(19) United States
(12) Patent Application Publication
(10) Pub. No.: US 2024/0327867 A1
(43) Pub. Date: Oct. 3, 2024

(54) ANELLOVIRUS CONSTRUCTS COMPRISING RECOMBINATION SITES AND CROSS-PACKAGING OF ANELLOVECTOR PARTICLES AND GENETIC ELEMENTS

(71) Applicant: FLAGSHIP PIONEERING INNOVATIONS V, INC., Cambridge, MA (US)

(72) Inventors: Joseph Michael Cabral, East Boston, MA (US); Cato Hawkins Prince, Waltham, MA (US); Bryan Alexander McGuffie, Jamaica Plain, MA (US); Hassana Kia Oyibo, Everett, MA (US); Simon Delagrave, Sudbury, MA (US); Dhananjay Maniklal Nawandar, Waltham, MA (US); Kevin James Lebo, Weymouth, MA (US); Cesar Augusto Arze, Boston, MA (US); Agamoni Bhattacharyya, Allston, MA (US); Nathan Lawrence Yozwiak, Newton, MA (US); Roger Joseph Hajjar, Lexington, MA (US); Geoffrey Parsons, Jamaica Plain, MA (US)

(21) Appl. No.: 18/605,384

(22) Filed: Mar. 14, 2024

Related U.S. Application Data
(60) Provisional application No. 63/505,515, filed on Jun. 1, 2023.
(60) Provisional application No. 63/490,457, filed on Mar. 15, 2023.

(51) Int. Cl. C12N 15/86; A61K 47/64; C07K 14/005

(52) U.S. Cl. CPC C12N 15/86; A61K 47/64; C07K 14/005; C12N 2750/00022; C12N 2750/00023; C12N 2750/00043; C12N 2750/00051; C12N 2750/00071; C12N 2830/008; C12N 2840/203

(57) ABSTRACT

This invention relates generally to modified anellovirus capsid proteins, anellovectors, anelloVLPs, and compositions and uses thereof.

### CROSS REFERENCE TO RELATED APPLICATIONS

[0001] This application claims the benefit of U.S. Provisional Application No. 63/490,457, filed Mar. 15, 2023, and U.S. Provisional Application No. 63/505,515, filed Jun. 1, 2023. The contents of the aforementioned applications are hereby incorporated by reference in their entirety.

### SEQUENCE LISTING

[0002] The instant application contains a Sequence Listing which has been submitted electronically in XML file format and is hereby incorporated by reference in its entirety. Said XML copy, created on Mar. 13, 2024, is named V2057-701310_SL.xml and is 1,773,093 bytes in size.

### BACKGROUND

[0003] There is an ongoing need to develop suitable vectors to deliver therapeutic agents to patients.

### SUMMARY

[0004] The present disclosure provides an Anelloviridae family vector (e.g., anellovector), e.g., a synthetic Anelloviridae family vector (e.g., anellovector), that can be used as a delivery vehicle, e.g., for delivering genetic material, for delivering an effector, e.g., a payload, or for delivering a therapeutic agent or a therapeutic effector to a eukaryotic cell (e.g., a human cell or a human tissue). In some embodiments, an Anelloviridae family vector (e.g., particle, e.g., a viral particle, e.g., an Anellovirus particle) comprises a genetic element (e.g., a genetic element comprising a therapeutic DNA sequence) encapsulated in a proteinaceous exterior (e.g., a proteinaceous exterior comprising an Anelloviridae family viral capsid protein, e.g., an Anellovirus ORF1 molecule or a polypeptide encoded by an Anellovirus ORF1 nucleic acid, or a chicken anemia virus (CAV) VP1 molecule or a polypeptide encoded by a CAV VP1 nucleic acid, e.g., as described herein), which is capable of introducing the genetic element into a cell (e.g., a mammalian cell, e.g., a human cell). In some embodiments, the Anelloviridae family vector is a particle comprising a proteinaceous exterior comprising a polypeptide encoded by an Anelloviridae family viral protein, e.g., an Anellovirus ORF1 nucleic acid (e.g., an ORF1 nucleic acid of an Alphatorquevirus, Betatorquevirus, or Gammatorquevirus, e.g., as described herein) or a CAV VP1 nucleic acid.

[0005] It is understood that embodiments described herein with respect to anellovectors, anelloVLPs, or Anelloviruses generally can also be applicable to other Anelloviridae family viruses (e.g., CAV), or vectors and VLPs based thereon. For example, methods and compositions described herein relating to anellovectors can be used for vectorized particles comprising components (e.g., polypeptide or nucleic acid sequences) from CAV or other Anelloviridae family viruses. In some instances, methods and compositions described herein relating to anelloVLPs can be used for virus-like particles (VLPs) comprising components (e.g., polypeptide or nucleic acid sequences) from CAV or other Anelloviridae family viruses. In some instances, methods and compositions described herein relating to Anelloviruses can be applied to corresponding components (e.g., polypeptide or nucleic acid molecules) from CAV or other Anelloviridae family viruses. In some instances, methods or compositions utilizing or producing an Anellovirus ORF molecule (e.g., an Anellovirus ORF1, ORF2, or ORF3 molecule), or a nucleic acid encoding same, can be applied to polypeptides from other Anelloviridae family viruses (e.g., a CAV VP1, VP2, or VP3 molecule), or nucleic acids encoding same.

[0006] In some instances, a description herein of a nucleic acid sequence (e.g., an Anelloviridae family viral sequence, or an element or fragment thereof; an Anelloviridae family vector sequence, or an element or fragment thereof; a recombinase recognition site; or a recombinase hybrid site) can refer to the sense strand, the antisense strand, or a double-stranded DNA comprising both the sense strand and antisense strands, or any sequence thereof. In some instances, a listing of a nucleic acid sequence herein can refer to the sequence listed and/or its reverse complement. In some embodiments, the proteinaceous exterior of an anellovector or anelloVLP comprises a modified Anellovirus ORF1 molecule. In some embodiments, the Anellovirus ORF1 molecule is modified to delete at least a portion of the structural arginine-rich region (e.g., as described herein). In some embodiments, the Anellovirus ORF1 molecule is modified to delete at least a portion of the structural C-terminal domain (e.g., as described herein). In some embodiments, the Anellovirus ORF1 molecule is a chimeric ORF1 molecule comprising a fragment or domain (e.g., a structural arginine-rich region, a P1 domain, a P2 domain, a P1-1 domain, and/or a P1-2 domain, e.g., as described herein) from a different Anellovirus ORF1 protein (e.g., as described herein). In some embodiments, the Anellovirus ORF1 molecule is a chimeric ORF1 molecule comprising a fragment or domain from a protein other than an Anellovirus ORF1 protein (e.g., a protein from another virus, e.g., as described herein).

[0007] In some embodiments, the anellovector or anelloVLP comprises on its exterior surface (e.g., attached to a proteinaceous exterior) a surface moiety as described herein. In some embodiments, the proteinaceous exterior comprises an ORF1 molecule attached to the surface moiety. In some embodiments, the proteinaceous exterior comprises an ORF1 molecule comprising a click handle. In some embodiments, the proteinaceous exterior comprises an ORF1 molecule fused to a polypeptide surface moiety. In some embodiments, the proteinaceous exterior comprises a plurality of ORF1 molecules each attached to a surface moiety, e.g., wherein the plurality of ORF1 molecules form a multimer (e.g., a dimer, trimer, or pentamer).

[0008] The genetic element of an anellovector of the present disclosure is typically a circular and/or single-stranded DNA molecule (e.g., circular and single stranded), and generally includes a protein binding sequence that binds to the proteinaceous exterior enclosing it, or a polypeptide attached thereto, which may facilitate enclosure of the genetic element within the proteinaceous exterior and/or enrichment of the genetic element, relative to other nucleic acids, within the proteinaceous exterior. In some instances, the genetic element is circular or linear. In some instances, the genetic element comprises or encodes an effector (e.g., a nucleic acid effector, such as a non-coding RNA, or a polypeptide effector, e.g., a protein), e.g., which can be expressed in the cell. In some embodiments, the effector is a therapeutic agent or a therapeutic effector, e.g., as described herein. In some instances, the effector is an endogenous effector or an exogenous effector, e.g., to a wild-type Anellovirus or a target cell. In some embodiments, the effector is exogenous to a wild-type Anellovirus or a target cell. In some embodiments, the anellovector can deliver an effector into a cell by contacting the cell and introducing a genetic element encoding the effector into the cell, such that the effector is made or expressed by the cell. In certain instances, the effector is an endogenous effector (e.g., endogenous to the target cell but, e.g., provided in increased amounts by the anellovector). In other instances, the effector is an exogenous effector. The effector can, in some instances, modulate a function of the cell or modulate an activity or level of a target molecule in the cell. For example, the effector can decrease levels of a target protein in the cell. In another example, the anellovector can deliver and express an effector, e.g., an exogenous protein, in vivo. Anellovectors can be used, for example, to deliver genetic material to a target cell, tissue or subject; to deliver an effector to a target cell, tissue or subject; or for treatment of diseases and disorders, e.g., by delivering an effector that can operate as a therapeutic agent to a desired cell, tissue, or subject. In some instances, the anellovector is made by in vitro assembly. In vitro assembly of an anellovector generally involves the formation of a proteinaceous exterior enclosing a genetic element, which occurs outside of a host cell (e.g., in a cell-free suspension, lysate, or supernatant). In vitro assembly may, in some instances, utilize components generated in a host cell but does not generally require a host cell for particle assembly.

[0009] The present disclosure provides an anelloVLP, e.g., a synthetic anelloVLP, which can be used as a delivery vehicle, e.g., for delivering genetic material, for delivering an effector, e.g., a payload, or for delivering a therapeutic agent or a therapeutic effector to a eukaryotic cell (e.g., a human cell or a human tissue). The anelloVLP generally comprises on its exterior surface (e.g., attached to a proteinaceous exterior) a surface moiety as described herein. In some embodiments, the surface moiety comprises the effector. In some embodiments, the surface moiety comprises a targeting agent (e.g., an agent that targets the anelloVLP to a target cell or tissue). In some embodiments, an anelloVLP (e.g., particle, e.g., a viral particle, e.g., an Anellovirus particle) comprises a proteinaceous exterior (e.g., a proteinaceous exterior comprising an Anellovirus capsid protein, e.g., an Anellovirus ORF1 molecule or a polypeptide encoded by an Anellovirus ORF1 nucleic acid, e.g., as described herein). In some embodiments, the anelloVLP is a particle comprising a proteinaceous exterior comprising a polypeptide encoded by an Anellovirus ORF1 nucleic acid (e.g., an ORF1 nucleic acid of Betatorquevirus, e.g., as described herein). In some embodiments, the proteinaceous exterior encloses an effector. In some embodiments, the effector is a therapeutic agent or a therapeutic effector, e.g., as described herein. In some instances, the effector is an endogenous effector or an exogenous effector, e.g., to a wild-type Anellovirus or a target cell. In some embodiments, the effector is exogenous to a wild-type Anellovirus or a target cell. In some embodiments, the anelloVLP can deliver an effector into a cell by contacting the cell and introducing the effector into the cell. In certain instances, the effector is an endogenous effector (e.g., endogenous to the target cell but, e.g., provided in increased amounts by the anelloVLP). In other instances, the effector is an exogenous effector. The effector can, in some instances, modulate a function of the cell or modulate an activity or level of a target molecule in the cell. For example, the effector can decrease levels of a target protein in the cell. In another example, the anelloVLP can deliver an effector, e.g., an exogenous protein, in vivo. AnelloVLPs can be used, for example, to deliver an effector to a target cell, tissue or subject; or for treatment of diseases and disorders, e.g., by delivering an effector that can operate as a therapeutic agent to a desired cell, tissue, or subject. In some instances, the anelloVLP is made by in vitro assembly. In vitro assembly of an anelloVLP generally involves the formation of a proteinaceous exterior in connection with an effector (e.g., the proteinaceous exterior enclosing the effector), which occurs outside of a host cell (e.g., in a cell-free suspension, lysate, or supernatant). In vitro assembly of an anelloVLP may, in some instances, utilize components generated in a host cell but does not generally require a host cell for particle assembly.

[0010] The invention further provides synthetic anellovectors and synthetic anelloVLPs. A synthetic anellovector or synthetic anelloVLP has at least one structural difference compared to a wild-type virus (e.g., a wild-type Anellovirus, e.g., a described herein), e.g., a deletion, insertion, substitution, modification (e.g., enzymatic modification), relative to the wild-type virus. Generally, synthetic anellovectors and synthetic anelloVLPs include a proteinaceous exterior, which can be used for delivering an effector (e.g., an exogenous effector or an endogenous effector) into eukaryotic (e.g., human) cells. In some embodiments, the anellovector or anelloVLP does not cause a detectable and/or an unwanted immune or inflammatory response, e.g., does not cause more than a 1%, 5%, 10%, 15% increase in a molecular marker(s) of inflammation, e.g., TNF-alpha, IL-6, IL-12, IFN, as well as B-cell response e.g. reactive or neutralizing antibodies, e.g., the anellovector or anelloVLP may be substantially non-immunogenic to the target cell, tissue or subject.

[0011] In an aspect, the invention features an anellovector comprising: (i) a genetic element comprising a promoter element and a sequence encoding an effector (e.g., an endogenous or exogenous effector), and a protein binding sequence (e.g., an exterior protein binding sequence, e.g., a packaging signal); and (ii) a proteinaceous exterior; wherein the genetic element is enclosed within the proteinaceous exterior (e.g., a capsid); and wherein the anellovector is capable of delivering the genetic element into a eukaryotic (e.g., mammalian, e.g., human) cell. In some embodiments, the anellovector comprises a surface moiety (e.g., a surface moiety having effector and/or targeting function), e.g., displayed on the exterior surface of the anellovector (e.g., as described herein). In some embodiments, the surface moiety comprises the effector.

[0012] In some embodiments, the genetic element is a single-stranded and/or circular DNA. Alternatively or in combination, the genetic element has one, two, three, or all of the following properties: is circular, is single-stranded, it integrates into the genome of a cell at a frequency of less than about 0.0001%, 0.001%, 0.005%, 0.01%, 0.05%, 0.1%, 0.5%, 1%, 1.5%, or 2% of the genetic element that enters the cell, and/or it integrates into the genome of a target cell at less than 1, 2, 3, 4, 5, 6, 7, 8, 9, 10, 15, 20, 25, or 30 copies per genome. In some embodiments, integration frequency is determined as described in Wang et al. (2004, Gene Therapy 11: 711-721, incorporated herein by reference in its entirety). In some embodiments, the genetic element is enclosed within the proteinaceous exterior. In some embodiments, the anellovector is capable of delivering the genetic element into a eukaryotic cell. In some embodiments, the genetic element comprises a nucleic acid sequence (e.g., a nucleic acid sequence of between 300-4000 nucleotides, e.g., between 300-3500 nucleotides, between 300-3000 nucleotides, between 300-2500 nucleotides, between 300-2000 nucleotides, between 300-1500 nucleotides) having at least 75% (e.g., at least 75, 76, 77, 78, 79, 80, 90, 91, 92, 93, 94, 95, 96, 97, 98, 99, or 100%) sequence identity to a sequence of a wild-type Anellovirus (e.g., a wild-type Torque Teno virus (TTV), Torque Teno mini virus (TTMV), or TTMDV sequence, e.g., a wild-type Anellovirus sequence as listed in any one of Tables A1-A32 or N1-N32). In some embodiments, the genetic element comprises a nucleic acid sequence (e.g., a nucleic acid sequence of at least 300 nucleotides, 500 nucleotides, 1000 nucleotides, 1500 nucleotides, 2000 nucleotides, 2500 nucleotides, 3000 nucleotides or more) having at least 75% (e.g., at least 75, 76, 77, 78, 79, 80, 90, 91, 92, 93, 94, 95, 96, 97, 98, 99, or 100%) sequence identity to a sequence of a wild-type Anellovirus (e.g., a wild-type Anellovirus sequence as described herein, e.g., as listed in any one of Tables A1-A32 or N1-N32). In some embodiments, the nucleic acid sequence is codon-optimized, e.g., for expression in a mammalian (e.g., human) cell. In some embodiments, at least 50%, 60%, 70%, 80%, 90%, 95%, 96%, 97%, 98%, 99%, or 100% of the codons in the nucleic acid sequence are codon-optimized, e.g., for expression in a mammalian (e.g., human) cell.

[0013] In an aspect, the invention features an anelloVLP comprising a proteinaceous exterior (e.g., a capsid) and an effector; wherein the anelloVLP is capable of delivering the effector into a eukaryotic (e.g., mammalian, e.g., human) cell. In some embodiments, the effector is comprised in a surface moiety, e.g., displayed on the exterior surface of the anelloVLP (e.g., as described herein).

[0014] In an aspect, the invention features an infectious (to a human cell) particle comprising an Anellovirus capsid (e.g., a capsid comprising an Anellovirus ORF, e.g., ORF1, polypeptide). In some embodiments, the infectious particle encapsulates a genetic element comprising a protein binding sequence that binds to the capsid and a heterologous (to the Anellovirus) sequence encoding a therapeutic effector. In some embodiments, the particle is capable of delivering the genetic element into a mammalian, e.g., human, cell. In some embodiments, the genetic element has less than about 6% (e.g., less than 6%, 5.5%, 5%, 4.5%, 4%, 3.5%, 3%, 2.5%, 2%, 1.5%, or less) identity to a wild type Anellovirus. In some embodiments, the genetic element has no more than 1.5%, 2%, 2.5%, 3%, 3.5%, 4%, 4.5%, 5%, 5.5% or 6% identity to a wild type Anellovirus. In some embodiments, the genetic element has at least about 2% to at least about 5.5% (e.g., 2 to 5%, 3% to 5%, 4% to 5%) identity to a wild type Anellovirus. In some embodiments, the genetic element has greater than about 2000, 3000, 4000, 4500, or 5000 nucleotides of non-viral sequence (e.g., non Anellovirus genome sequence). In some embodiments, the genetic element has greater than about 2000 to 5000, 2500 to 4500, 3000 to 4500, 2500 to 4500, 3500, or 4000, 4500 (e.g., between about 3000 to 4500) nucleotides of non-viral sequence (e.g., non Anellovirus genome sequence). In some embodiments, the genetic element is a single-stranded, circular DNA. Alternatively or in combination, the genetic element has one, two or 3 of the following properties: is circular, is single stranded, it integrates into the genome of a cell at a frequency of less than about 0.001%, 0.005%, 0.01%, 0.05%, 0.1%, 0.5%, 1%, 1.5%, or 2% of the genetic element that enters the cell, it integrates into the genome of a target cell at less than 1, 2, 3, 4, 5, 6, 7, 8, 9, 10, 15, 20, 25, or 30 copies per genome or integrates at a frequency of less than about 0.0001%, 0.001%, 0.005%, 0.01%, 0.05%, 0.1%, 0.5%, 1%, 1.5%, or 2% of the genetic element that enters the cell. In some embodiments, integration frequency is determined as described in Wang et al. (2004, Gene Therapy 11: 711-721, incorporated herein by reference in its entirety).

[0015] Also described herein are viral vectors and viral particles based on Anelloviruses, which can be used to deliver an agent (e.g., an exogenous effector or an endogenous effector, e.g., a therapeutic effector) to a cell (e.g., a cell in a subject to be treated therapeutically). In some embodiments, Anelloviruses can be used as effective delivery vehicles for introducing an agent, such as an effector described herein, to a target cell, e.g., a target cell in a subject to be treated therapeutically or prophylactically.

[0016] In an aspect, the invention features a polypeptide (e.g., a synthetic polypeptide, e.g., an ORF1 molecule) comprising (e.g., in series):
[0017] (i) a first region comprising a structural arginine-rich region, e.g., amino acid sequence having at least 70% (e.g., at least about 70, 80, 90, 95, 96, 97, 98, 99, or 100%) sequence identity to a structural arginine-rich region sequence described herein or a sequence of at least about 40 amino acids comprising at least 60%, 70%, or 80% basic residues (e.g., arginine, lysine, or a combination thereof),
[0018] (ii) a second region comprising a structural jelly-roll domain, e.g., an amino acid sequence having at least 30% (e.g., at least about 30, 35, 40, 50, 60, 70, 80, 90, 95, 96, 97, 98, 99, or 100%) sequence identity to a structural jelly-roll region sequence described herein or a sequence comprising at least 6 beta strands,
[0019] (iii) a third region comprising an amino acid sequence having at least 30% (e.g., at least about 30, 35, 40, 50, 60, 70, 80, 90, 95, 96, 97, 98, 99, or 100%) sequence identity to an structural N22 domain sequence described herein,
[0020] (iv) a fourth region comprising an amino acid sequence having at least 70% (e.g., at least about 70, 80, 90, 95, 96, 97, 98, 99, or 100%) sequence identity to an Anellovirus ORF1 structural C-terminal domain (CTD) sequence described herein, and
[0021] (v) optionally wherein the polypeptide has an amino acid sequence having less than 100%, 99%, 98%, 95%, 90%, 85%, 80% sequence identity to a wild type Anellovirus ORF1 protein described herein.

[0022] In some embodiments, the polypeptide comprises at least about 70, 80, 90, 95, 96, 97, 98, 99, or 100% sequence identity to an Anellovirus ORF1 molecule as described herein (e.g., as listed in any one of Tables A1-A32). In some embodiments, the polypeptide comprises at least about 70, 80, 90, 95, 96, 97, 98, 99, or 100% sequence identity to a subsequence (e.g., a structural arginine (Arg)-rich domain, a structural jelly-roll domain, a hypervariable region (HVR), an structural N22 domain, or a structural C-terminal domain (CTD)) of an Anellovirus ORF1 molecule as described herein. In one embodiment, the amino acid sequences of the (i), (ii), (iii), and (iv) region have at least 90% sequence identity to their respective references and wherein the polypeptide has an amino acid sequence having less than 100%, 99%, 98%, 95%, 90%, 85%, 80% sequence identity to a wild type Anellovirus ORF1 protein described herein.

[0023] In an aspect, the invention features a complex comprising a polypeptide as described herein (e.g., an Anellovirus ORF1 molecule as described herein) and a genetic element comprising a promoter element and a nucleic acid sequence (e.g., a DNA sequence) encoding an effector (e.g., an exogenous effector or an endogenous effector), and a protein binding sequence.

[0024] The present disclosure further provides nucleic acid molecules (e.g., a nucleic acid molecule that includes a genetic element as described herein, or a nucleic acid molecule that includes a sequence encoding a proteinaceous exterior protein as described herein). A nucleic acid molecule of the invention may include one or both of (a) a genetic element as described herein, and (b) a nucleic acid sequence encoding a proteinaceous exterior protein as described herein.

[0025] In an aspect, the invention features an isolated nucleic acid molecule comprising a genetic element comprising a promoter element operably linked to a sequence encoding an effector, e.g., a payload, and an exterior protein binding sequence. In some embodiments, the exterior protein binding sequence includes a sequence at least 75% (at least 80%, 85%, 90%, 95%, 97%, 100%) identical to a 5′UTR sequence of an Anellovirus, as disclosed herein. In some embodiments, the genetic element is a single-stranded DNA, is circular, integrates at a frequency of less than about 0.001%, 0.005%, 0.01%, 0.05%, 0.1%, 0.5%, 1%, 1.5%, or 2% of the genetic element that enters the cell, and/or integrates into the genome of a target cell at less than 1, 2, 3, 4, 5, 6, 7, 8, 9, 10, 15, 20, 25, or 30 copies per genome or integrates at a frequency of less than about 0.001%, 0.005%, 0.01%, 0.05%, 0.1%, 0.5%, 1%, 1.5%, or 2% of the genetic element that enters the cell. In some embodiments, integration frequency is determined as described in Wang et al. (2004, Gene Therapy 11: 711-721, incorporated herein by reference in its entirety). In embodiments, the effector does not originate from TTV and is not an SV40-miR-S1. In embodiments, the nucleic acid molecule does not comprise the polynucleotide sequence of TTMV-LY2. In embodiments, the promoter element is capable of directing expression of the effector in a eukaryotic (e.g., mammalian, e.g., human) cell.

[0026] In some embodiments, the nucleic acid molecule is circular. In some embodiments, the nucleic acid molecule is linear. In some embodiments, a nucleic acid molecule described herein comprises one or more modified nucleotides (e.g., a base modification, sugar modification, or backbone modification).

[0027] In some embodiments, the nucleic acid molecule comprises a sequence encoding an ORF1 molecule (e.g., an Anellovirus ORF1 protein, e.g., as described herein). In some embodiments, the nucleic acid molecule comprises a sequence encoding an ORF2 molecule (e.g., an Anellovirus ORF2 protein, e.g., as described herein). In some embodiments, the nucleic acid molecule comprises a sequence encoding an ORF3 molecule (e.g., an Anellovirus ORF3 protein, e.g., as described herein). In an aspect, the invention features a genetic element comprising one, two, or three of: (i) a promoter element and a sequence encoding an effector, e.g., an exogenous or endogenous effector; (ii) at least 72 contiguous nucleotides (e.g., at least 72, 73, 74, 75, 76, 77, 78, 79, 80, 90, 100, or 150 nucleotides) having at least 75% (e.g., at least 75, 76, 77, 78, 79, 80, 90, 91, 92, 93, 94, 95, 96, 97, 98, 99, or 100%) sequence identity to a wild-type Anellovirus sequence; or at least 100 (e.g., at least 300, 500, 1000, 1500) contiguous nucleotides having at least 72% (e.g., at least 72, 73, 74, 75, 76, 77, 78, 79, 80, 90, 91, 92, 93, 94, 95, 96, 97, 98, 99, or 100%) sequence identity to a wild-type Anellovirus sequence; and (iii) a protein binding sequence, e.g., an exterior protein binding sequence, and wherein the nucleic acid construct is a single-stranded DNA; and wherein the nucleic acid construct is circular, integrates at a frequency of less than about 0.001%, 0.005%, 0.01%, 0.05%, 0.1%, 0.5%, 1%, 1.5%, or 2% of the genetic element that enters the cell, and/or integrates into the genome of a target cell at less than 1, 2, 3, 4, 5, 6, 7, 8, 9, 10, 15, 20, 25, or 30 copies per genome In some embodiments, a genetic element encoding an effector (e.g., an exogenous or endogenous effector, e.g., as described herein) is codon optimized. In some embodiments, the genetic element is circular. In some embodiments, the genetic element is linear. In some embodiments, the genetic element comprises an anellovector, e.g., as described herein. In some embodiments, a genetic element described herein comprises one or more modified nucleotides (e.g., a base modification, sugar modification, or backbone modification). In some embodiments, the genetic element comprises a sequence encoding an ORF1 molecule (e.g., an Anellovirus ORF1 protein, e.g., as described herein). In some embodiments, the genetic element comprises a sequence encoding an ORF2 molecule (e.g., an Anellovirus ORF2 protein, e.g., as described herein). In some embodiments, the genetic element comprises a sequence encoding an ORF3 molecule (e.g., an Anellovirus ORF3 protein, e.g., as described herein).

[0028] In an aspect, the invention features a host cell or helper cell comprising: (a) a nucleic acid comprising a sequence encoding one or more of an ORF1 molecule, an ORF2 molecule, or an ORF3 molecule (e.g., a sequence encoding an Anellovirus ORF1 polypeptide described herein), wherein the nucleic acid is a plasmid, is a viral nucleic acid, or is integrated into a helper cell chromosome; and (b) a genetic element, wherein the genetic element comprises (i) a promoter element operably linked to a nucleic acid sequence (e.g., a DNA sequence) encoding an effector (e.g., an exogenous effector or an endogenous effector) and (ii) a protein binding sequence that binds the polypeptide of (a), wherein optionally the genetic element does not encode an ORF1 polypeptide (e.g., an ORF1 protein). For example, the host cell or helper cell comprises (a) and (b) either in cis (both part of the same nucleic acid molecule) or in trans (each part of a different nucleic acid molecule). In embodiments, the genetic element of (b) is circular, single-stranded DNA. In some embodiments, the host cell is a manufacturing cell line. In some embodiments, the host cell or helper cell is adherent or in suspension, or both. In some embodiments, the host cell or helper cell is grown in a microcarrier. In some embodiments, the host cell or helper cell is compatible with cGMP manufacturing practices. In some embodiments, the host cell or helper cell is grown in a medium suitable for promoting cell growth. In certain embodiments, once the host cell or helper cell has grown sufficiently (e.g., to an appropriate cell density), the medium may be exchanged with a medium suitable for production of anellovectors by the host cell or helper cell.

[0029] In an aspect, the invention features a pharmaceutical composition comprising an anellovector (e.g., a synthetic anellovector) as described herein. In embodiments, the pharmaceutical composition further comprises a pharmaceutically acceptable carrier or excipient. In embodiments, the pharmaceutical composition comprises a unit dose comprising about 10⁵-10¹⁴ genome equivalents of the anellovector per kilogram of a target subject. In some embodiments, the pharmaceutical composition comprising the preparation will be stable over an acceptable period of time and temperature, and/or be compatible with the desired route of administration and/or any devices this route of administration will require, e.g., needles or syringes. In some embodiments, the pharmaceutical composition is formulated for administration as a single dose or multiple doses. In some embodiments, the pharmaceutical composition is formulated at the site of administration, e.g., by a healthcare professional. In some embodiments, the pharmaceutical composition comprises a desired concentration of anellovector genomes or genomic equivalents (e.g., as defined by number of genomes per volume).

[0030] In an aspect, the invention features a method of treating a disease or disorder in a subject, the method comprising administering to the subject an anellovector, e.g., a synthetic anellovector, e.g., as described herein.

[0031] In an aspect, the invention features a method of delivering an effector or payload (e.g., an endogenous or exogenous effector) to a cell, tissue or subject, the method comprising administering to the subject an anellovector, e.g., a synthetic anellovector, e.g., as described herein, wherein the anellovector comprises a nucleic acid sequence encoding the effector. In embodiments, the payload is a nucleic acid. In embodiments, the payload is a polypeptide.

[0032] In an aspect, the invention features a method of delivering an anellovector to a cell, comprising contacting the anellovector, e.g., a synthetic anellovector, e.g., as described herein, with a cell, e.g., a eukaryotic cell, e.g., a mammalian cell, e.g., in vivo or ex vivo.

[0033] In an aspect, the invention features a method of treating a disease or disorder in a subject, the method comprising administering to the subject an anelloVLP, e.g., a synthetic anelloVLP, e.g., as described herein.

[0034] In an aspect, the invention features a method of delivering an effector or payload (e.g., an endogenous or exogenous effector) to a cell, tissue or subject, the method comprising administering to the subject an anelloVLP, e.g., a synthetic anelloVLP, e.g., as described herein, wherein the anelloVLP comprises the effector (e.g., wherein the proteinaceous exterior of the anelloVLP encapsulates the effector). In embodiments, the payload is a nucleic acid. In embodiments, the payload is a polypeptide (e.g., a protein).

[0035] In an aspect, the invention features a method of delivering an anelloVLP to a cell, comprising contacting the anelloVLP, e.g., a synthetic anelloVLP, e.g., as described herein, with a cell, e.g., a eukaryotic cell, e.g., a mammalian cell, e.g., in vivo or ex vivo.

[0036] In an aspect, the invention features a method of making an anellovector, e.g., a synthetic anellovector. The method includes:
[0037] a) providing a host cell comprising:
[0038] (i) a first nucleic acid molecule comprising the nucleic acid sequence of a genetic element of an anellovector, e.g., a synthetic anellovector, as described herein, and
[0039] (ii) the first nucleic acid or a second nucleic acid molecule encoding one or more of an amino acid sequence chosen from ORF1, ORF2, ORF2/2, ORF2/3, ORF1/1, or ORF1/2, e.g., as listed in any one of Tables A1-A32, or an amino acid sequence having at least 70% (e.g., at least 70%, 75%, 80%, 85%, 90%, 95%, 96%, 97%, 98%, 99%, or 100%) sequence identity thereto; and
[0040] b) incubating the host cell under conditions suitable to make the anellovector.

[0041] In some embodiments, the method further includes, prior to step (a), introducing the first nucleic acid molecule and/or the second nucleic acid molecule into the host cell. In some embodiments, the second nucleic acid molecule is introduced into the host cell prior to, concurrently with, or after the first nucleic acid molecule. In other embodiments, the second nucleic acid molecule is integrated into the genome of the host cell. In some embodiments, the second nucleic acid molecule is a helper (e.g., a helper plasmid or the genome of a helper virus).

[0042] In another aspect, the invention features a method of manufacturing an anellovector composition, comprising:
[0043] a) providing a host cell comprising, e.g., expressing one or more components (e.g., all of the components) of an anellovector, e.g., a synthetic anellovector, e.g., as described herein. For example, the host cell comprises (a) a nucleic acid comprising a sequence encoding an Anellovirus ORF1 polypeptide described herein, wherein the nucleic acid is a plasmid, is a viral nucleic acid, or is integrated into a helper cell chromosome; and (b) a genetic element, wherein the genetic element comprises (i) a promoter element operably linked to a nucleic acid sequence (e.g., a DNA sequence) encoding an effector (e.g., an exogenous effector or an endogenous effector) and (i) a protein binding sequence (e.g., packaging sequence) that binds the polypeptide of (a), wherein the host cell or helper cell comprises (a) and (b) either in cis or in trans. In embodiments, the genetic element of (b) is circular, single-stranded DNA. In some embodiments, the host cell is a manufacturing cell line;
[0044] b) culturing the host cell under conditions suitable for producing a preparation of anellovectors from the host cell, wherein the anellovectors of the preparation comprise a proteinaceous exterior (e.g., comprising an ORF1 molecule) encapsulating the genetic element (e.g., as described herein), thereby making a preparation of anellovectors; and
[0045] optionally, c) formulating the preparation of anellovectors, e.g., as a pharmaceutical composition suitable for administration to a subject.

[0046] In some embodiments, the components of the anellovector are introduced into the host cell at the time of production (e.g., by transient transfection). In some embodiments, the host cell stably expresses the components of the anellovector (e.g., wherein one or more nucleic acids encoding the components of the anellovector are introduced into the host cell, or a progenitor thereof, e.g., by stable transfection).

[0047] In some embodiments, the method further comprises one or more purification steps (e.g., purification by sedimentation, chromatography, and/or ultrafiltration). In some embodiments, the purification steps comprise removing one or more of serum, host cell DNA, host cell proteins, particles lacking the genetic element, and/or phenol red from the preparation. In some embodiments, the resultant preparation or a pharmaceutical composition comprising the preparation will be stable over an acceptable period of time and temperature, and/or be compatible with the desired route of administration and/or any devices this route of administration will require, e.g., needles or syringes.

[0048] In an aspect, the invention features a method of manufacturing an anellovector composition, comprising: a) providing a plurality of anellovectors described herein, or a preparation of anellovectors described herein; and b) formulating the anellovectors or preparation thereof, e.g., as a pharmaceutical composition suitable for administration to a subject.

[0049] In an aspect, the invention features a method of manufacturing an anelloVLP composition, comprising: a) providing a plurality of anelloVLPs described herein, or a preparation of anelloVLPs described herein; and b) formulating the anelloVLPs or preparation thereof, e.g., as a pharmaceutical composition suitable for administration to a subject.

[0050] In an aspect, the invention features a method of making a host cell, e.g., a first host cell or a producer cell (e.g., as shown in FIG. 8), e.g., a population of first host cells, comprising an anellovector, the method comprising introducing a genetic element, e.g., as described herein, to a host cell and culturing the host cell under conditions suitable for production of the anellovector. In some embodiments, the method further comprises introducing a helper, e.g., a helper virus, to the host cell. In some embodiments, the introducing comprises transfection (e.g., chemical transfection) or electroporation of the host cell with the anellovector.

[0051] In an aspect, the invention features a method of making an anellovector, comprising providing a host cell, e.g., a first host cell or producer cell (e.g., as shown in FIG. 8), comprising an anellovector, e.g., as described herein, and purifying the anellovector from the host cell. In some embodiments, the method further comprises, prior to the providing step, contacting the host cell with an anellovector, e.g., as described herein, and incubating the host cell under conditions suitable for production of the anellovector. In some embodiments, the host cell is the first host cell or producer cell described in the above method of making a host cell. In some embodiments, purifying the anellovector from the host cell comprises lysing the host cell.

[0052] In some embodiments, the method further comprises a second step of contacting the anellovector produced by the first host cell or producer cell with a second host cell, e.g., a permissive cell (e.g., as shown in FIG. 8), e.g., a population of second host cells. In some embodiments, the method further comprises incubating the second host cell inder conditions suitable for production of the anellovector. In some embodiments, the method further comprises purifying an anellovector from the second host cell, e.g., thereby producing an anellovector seed population. In some embodiments, at least about 2-100-fold more of the anellovector is produced from the population of second host cells than from the population of first host cells. In some embodiments, purifying the anellovector from the second host cell comprises lysing the second host cell. In some embodiments, the method further comprises a second step of contacting the anellovector produced by the second host cell with a third host cell, e.g., permissive cells (e.g., as shown in FIG. 8), e.g., a population of third host cells. In some embodiments, the method further comprises incubating the third host cell inder conditions suitable for production of the anellovector. In some embodiments, the method further comprises purifying an anellovector from the third host cell, e.g., thereby producing an anellovector stock population. In some embodiments, purifying the anellovector from the third host cell comprises lysing the third host cell. In some embodiments, at least about 2-100-fold more of the anellovector is produced from the population of third host cells than from the population of second host cells.

[0053] In some embodiments, the host cell is grown in a medium suitable for promoting cell growth. In certain embodiments, once the host cell has grown sufficiently (e.g., to an appropriate cell density), the medium may be exchanged with a medium suitable for production of anellovectors by the host cell. In some embodiments, anellovectors produced by a host cell separated from the host cell (e.g., by lysing the host cell) prior to contact with a second host cell. In some embodiments, anellovectors produced by a host cell are contacted with a second host cell without an intervening purification step.

[0054] In an aspect, the invention features a method of making a pharmaceutical anellovector preparation. The method comprises (a) making an anellovector preparation as described herein, (b) evaluating the preparation (e.g., a pharmaceutical anellovector preparation, anellovector seed population or the anellovector stock population) for one or more pharmaceutical quality control parameters, e.g., identity, purity, titer, potency (e.g., in genomic equivalents per anellovector particle), and/or the nucleic acid sequence, e.g., from the genetic element comprised by the anellovector, and (c) formulating the preparation for pharmaceutical use of the evaluation meets a predetermined criterion, e.g., meets a pharmaceutical specification. In some embodiments, evaluating identity comprises evaluating (e.g., confirming) the sequence of the genetic element of the anellovector, e.g., the sequence encoding the effector. In some embodiments, evaluating purity comprises evaluating the amount of an impurity, e.g., mycoplasma, endotoxin, host cell nucleic acids (e.g., host cell DNA and/or host cell RNA), animal-derived process impurities (e.g., serum albumin or trypsin), replication-competent agents (RCA), e.g., replication-competent virus or unwanted anellovectors (e.g., an anellovector other than the desired anellovector, e.g., a synthetic anellovector as described herein), free viral capsid protein, adventitious agents, and aggregates. In some embodiments, evalating titer comprises evaluating the ratio of functional versus non-functional (e.g., infectious vs non-infectious) anellovectors in the preparation (e.g., as evaluated by HPLC). In some embodiments, evaluating potency comprises evaluating the level of anellovector function (e.g., expression and/or function of an effector encoded therein or genomic equivalents) detectable in the preparation. In some embodiments, the impurities comprise residual denaturant (e.g., urea) or cellular substituents (e.g., proteasomes or ferritin).

[0055] In some embodiments, the formulated preparation is substantially free of pathogens, host cell contaminants or impurities; has a predetermined level of non-infectious particles or a predetermined ratio of particles:infectious units (e.g., <300:1, <200:1, <100:1, or <50:1). In some embodiments, multiple anellovectors can be produced in a single batch. In some embodiments, the levels of the anellovectors produced in the batch can be evaluated (e.g., individually or together).

[0056] In an aspect, the invention features a method of making a pharmaceutical anelloVLP preparation. The method comprises (a) making an anelloVLP preparation as described herein, (b) evaluating the preparation (e.g., a pharmaceutical anelloVLP preparation, anelloVLP seed population or the anelloVLP stock population) for one or more pharmaceutical quality control parameters, e.g., identity, purity, titer, potency, and (c) formulating the preparation for pharmaceutical use of the evaluation meets a predetermined criterion, e.g., meets a pharmaceutical specification. In some embodiments, evaluating purity comprises evaluating the amount of an impurity, e.g., mycoplasma, endotoxin, host cell nucleic acids (e.g., host cell DNA and/or host cell RNA), animal-derived process impurities (e.g., serum albumin or trypsin), replication-competent agents (RCA), e.g., replication-competent virus or unwanted VLPs (e.g., an anelloVLP other than the desired anelloVLP, e.g., a synthetic anelloVLP as described herein), free viral capsid protein, adventitious agents, and aggregates. In some embodiments, evalating titer comprises evaluating the ratio of functional versus non-functional (e.g., infectious vs non-infectious) anelloVLPs in the preparation (e.g., as evaluated by HPLC). In some embodiments, evaluating potency comprises evaluating the level of anelloVLP function (e.g., expression and/or function of an effector encoded therein or genomic equivalents) detectable in the preparation. In some embodiments, the impurities comprise residual denaturant (e.g., urea) or cellular substituents (e.g., proteasomes or ferritin).

[0057] In some embodiments, the formulated preparation is substantially free of pathogens, host cell contaminants or impurities; has a predetermined level of non-infectious particles or a predetermined ratio of particles:infectious units (e.g., <300:1, <200:1, <100:1, or <50:1). In some embodiments, multiple anelloVLPs can be produced in a single batch. In some embodiments, the levels of the anelloVLPs produced in the batch can be evaluated (e.g., individually or together).

[0058] In an aspect, the invention features a host cell comprising:
[0059] (i) a first nucleic acid molecule comprising the nucleic acid sequence of a genetic element of an anellovector as described herein, and
[0060] (ii) optionally, a second nucleic acid molecule encoding one or more of an amino acid sequence chosen from ORF1, ORF2, ORF2/2, ORF2/3, ORF1/1, or ORF1/2 as listed in any one of Tables A1-A32, or an amino acid sequence having at least about 70% (e.g., at least about 70, 80, 90, 95, 96, 97, 98, 99, or 100%) sequence identity thereto.

[0061] In an aspect, the invention features a reaction mixture comprising an anellovector described herein and a helper virus, wherein the helper virus comprises a polynucleotide, e.g., a polynucleotide encoding an exterior protein, (e.g., an exterior protein capable of binding to the exterior protein binding sequence and, optionally, a lipid envelope), a polynucleotide encoding a replication protein (e.g., a polymerase), or any combination thereof.

[0062] In some embodiments, an anellovector (e.g., a synthetic anellovector) is isolated, e.g., isolated from a host cell and/or isolated from other constituents in a solution (e.g., a supernatant). In some embodiments, an anellovector (e.g., a synthetic anellovector) is purified, e.g., from a solution (e.g., a supernatant). In some embodiments, an anellovector is enriched in a solution relative to other constituents in the solution.

[0063] In some embodiments of any of the aforesaid anellovectors, compositions or methods, providing an anellovector comprises separating (e.g., harvesting) an anellovector from a composition comprising an anellovector-producing cell, e.g., as described herein. In other embodiments, providing an anellovector comprises obtaining an anellovector or a preparation thereof, e.g., from a third party.

[0064] In some embodiments of any of the aforesaid anellovectors, anellovectors, compositions or methods, the genetic element comprises an anellovector genome, e.g., as identified according to the method described in Example 9. In embodiments, the anellovector genome is an anellovector genome capable of self-replication and/or self-amplification. In some embodiments, the anellovector genome is not capable of self-replication and/or self-amplification. In some embodiments, the anellovector genome is capable of replicating and/or being amplified in trans, e.g., in the presence of a helper, e.g., a helper virus.

[0065] Additional features of any of the aforesaid anellovectors, anelloVLPs, compositions or methods include one or more of the following enumerated embodiments.

[0066] Those skilled in the art will recognize, or be able to ascertain using no more than routine experimentation, many equivalents to the specific embodiments of the invention described herein. Such equivalents are intended to be encompassed by the following enumerated embodiments.

### Enumerated Embodiments

[0067] 1. A particle comprising:
[0068] a proteinaceous exterior comprising about 40-80 (e.g., about 60), 100-140 (e.g., about 120), or 160-200 (e.g., about 180) copies of an Anellovirus ORF1 molecule,
[0069] wherein the particle:
   [0070] (i) does not comprise (e.g., does not enclose) a polynucleotide (e.g., as determined using a nuclease protection assay as described herein),
   [0071] (ii) does not comprise (e.g., does not enclose) a polynucleotide of greater than 1000, 500, 200, or 100 nucleotides in length, or
   [0072] (iii) comprises less than about 1, 2, 3, 4, 5, 6, 7, 8, 9, 10, 15, 20, 25, 30, 40, 50, 60, 70, 80, 90, 100, 150, 200, 250, 300, 400, 500, 600, 700, 800, 900, or 1000 nucleotides.
[0073] 2. The particle of embodiment 1, wherein the Anellovirus ORF1 molecule comprises an ORF1 domain and an exogenous surface moiety.
[0074] 3. The particle of embodiment 1, wherein the Anellovirus ORF1 molecule is bound to an exogenous surface moiety via a noncovalent integration or a covalent bond other than a peptide bond.
[0075] 4. The particle of embodiment 1, wherein the Anellovirus ORF1 molecule does not comprise a structural arginine-rich domain.
[0076] 5. The particle of embodiment 1, wherein the particle is a virus-like particle (VLP).
[0077] 6. A particle comprising:
[0078] (a) a proteinaceous exterior comprising about 40-80 (e.g., about 60), 100-140 (e.g., about 120), or 160-200 (e.g., about 180) copies of an Anellovirus ORF1 molecule and an exogenous surface moiety, and (b) a genetic element comprising a heterologous nucleic acid sequence encoding an exogenous effector.
[0079] 7. A particle comprising:
[0080] a proteinaceous exterior comprising an Anellovirus ORF1 molecule, wherein the ORF1 molecule comprises an ORF1 domain and an exogenous surface moiety;
[0081] wherein one or more of:
[0082] a) the exogenous surface moiety is chosen from a receptor, a ligand, an antibody molecule (e.g., scFv), an antigen (e.g., a viral antigen, a bacterial antigen, a fungal antigen, or a parasite antigen) an adjuvant (e.g., TLR agonist, e.g., bacterial flagellin);
[0083] b) wherein the ORF1 molecule comprises a hypervariable region (HVR);
[0084] c) wherein the particle comprises a genetic element that encodes a peptide or polypeptide that boosts an immune response (e.g. an adjuvant, a TCR agonist (e.g., a bacterial flagellin));
[0085] d) wherein the exogenos surface moiety is between 1-5, 5-10, 10-20, 20-50, 50-100, 100-200, 200-500, or 500-1000 amino acids in length;
[0086] e) wherein a polypeptide linker region is situated between the exogenous surface moiety and the ORF1 molecule,
[0087] f) wherein the particle comprises 1-2, 2-5, 5-10, 10-20, 20-40, 40-60, 60-80, 80-100, 100-125, 125-150, 150-175, 175-200, 200-225, 225-250, 250-275, or 275-300 copies of the exogenous surface moiety;
[0088] g) wherein the proteinaceous exterior comprises (i) a plurality of ORF1 molecules lacking the exogenous surface moiety (e.g., a wild-type ORF1 molecule) and (ii) a plurality of ORF1 molecules that comprise the exogenous surface moiety, wherein optionally the ratio of (i) (ii) is between 10:1-5:1, 5:1-2:1, 2:1-1:2, 1:2-1:5, or 1:5-1:10; and/or
[0089] h) wherein the particle further comprises a second exogenous surface moiety.
[0090] 8. The particle of embodiment 7, wherein the exogenous surface moiety is situated at an insertion point between an N-terminal portion of the ORF1 domain and a C-terminal portion of the ORF1 domain.
[0091] 9. The particle of embodiment 8, wherein the insertion point is in the HVR.
[0092] 10. The particle of any of embodiments 7-9, further comprising a genetic element comprising a heterologous nucleic acid sequence encoding an exogenous effector.
[0093] 11. The particle of any of embodiments 7-10, wherein the particle does not comprise (e.g., does not enclose) a polynucleotide, or does not comprise (e.g., does not enclose) a polynucleotide of greater than 1000, 500, 200, or 100 nucleotides in length, or comprises less than about 1, 2, 3, 4, 5, 6, 7, 8, 9, 10, 15, 20, 25, 30, 40, 50, 60, 70, 80, 90, 100, 150, 200, 250, 300, 400, 500, 600, 700, 800, 900, or 1000 nucleotides.
[0094] 12. A particle comprising:
[0095] a proteinaceous exterior comprising an Anellovirus ORF1 molecule, and an exogenous surface moiety, wherein the exogenous surface moiety is covalently bound to the ORF1 molecule using a bond other than a peptide bond.
[0096] 13. The particle of embodiment 12, wherein the exogenous surface moiety is attached to an NHS moiety, and the exogenous surface moiety is bound to the ORF1 molecule via the NHS moiety.
[0097] 14. The particle of embodiment 12, wherein a non-polypeptide linker is situated between the exogenous surface moiety and the ORF1 molecule.
[0098] 15. The particle of embodiment 14, wherein the non-polypeptide linker comprises a click linkage.
[0099] 16. The particle of embodiment 14, wherein the non-polypeptide linker is produced by a click reaction between a DBCO moiety and an azide moiety.
[0100] 17. The particle of embodiment 16, wherein, prior to the click reaction, the DBCO moiety is attached to the Anellovirus ORF1 molecule via an NHS moiety.
[0101] 18. The particle of embodiment 16 or 17, wherein, prior to the click reaction, the azide moiety is attached to the exogenous surface moiety via an NHS moiety.
[0102] 19. The particle of embodiment 17 or 18, wherein the NHS moiety of the DBCO moiety is attached to a lysine residue on the surface of the Anellovirus ORF1 molecule.
[0103] 20. The particle of any of embodiments 17-19, wherein the NHS moiety of the azide moiety is attached to a lysine residue on the surface of the exogenous surface moiety.
[0104] 21. The particle of embodiment 16, wherein, prior to the click reaction, the DBCO moiety is attached to the exogenous surface moiety via an NHS moiety.
[0105] 22. The particle of embodiment 16 or 21, wherein, prior to the click reaction, the azide moiety is attached to the Anellovirus ORF1 molecule via an NHS moiety.
[0106] 23. The particle of embodiment 21 or 22, wherein the NHS moiety of the DBCO moiety is attached to a lysine residue on the surface of the exogenous surface moiety.
[0107] 24. The particle of any of embodiments 21-23, wherein the NHS moiety of the azide moiety is attached to a lysine residue on the surface of the Anellovirus ORF1 molecule.
[0108] 25. A particle comprising:
[0109] a proteinaceous exterior comprising an Anellovirus ORF1 molecule, and an exogenous surface moiety, wherein the exogenous surface moiety is non-covalently bound to the ORF1 molecule.
[0110] 26. The particle of embodiment 25, wherein the ORF1 molecule comprises an exogenous binding domain (e.g., MS2 coat protein or avidin), and the exogenous surface moiety comprises a cognate binding moiety (e.g., MS2 hairpin or biotin) that binds the exogenous binding domain.
[0111] 27. The particle of any of embodiments 12-26, wherein the exogenous surface moiety comprises a polypeptide.
[0112] 28. The particle of any of embodiments 12-27, wherein the exogenous surface moiety comprises a small molecule or nucleic acid molecule (e.g., polynucleotide).
[0113] 29. The particle of any of the preceding embodiments, wherein the ratio of ORF1 molecule to exogenous surface moiety is between about 60:1-30:1, 30:1-20:1, 20:1-10:1, or 10:1-1:1. 30. The particle of any of the preceding embodiments, wherein the antibody molecule is a bispecific antibody molecule.
[0114] 31. The particle of embodiment 30, wherein the bispecific antibody molecule comprises:
[0115] a first antigen-binding domain that binds a first antigen on a first type of host cell, and
[0116] a second antigen-binding domain that binds a second antigen on a second type of host cell.
[0117] 32. The particle of any of the preceding embodiments, which is capable of entering a target cell, e.g., by endocytosis.
[0118] 33. The particle of embodiment 32, wherein the exogenous surface moiety binds to a cognate moiety in the target cell.
[0119] 34. The particle of embodiment 32, wherein the particle comprises a genetic element encoding an exogenous effector to be delivered to the interior of the target cell.
[0120] 35. The particle of any of the preceding embodiments, wherein a genetic element is enclosed within the proteinaceous exterior.
[0121] 36. The particle of any of the preceding embodiments, which particle does not comprise a polynucleotide, or does not comprise a polynucleotide of greater than 1000, 500, 200, or 100 nucleotides in length.
[0122] 37. The particle of any of the preceding embodiments, wherein the Anellovirus ORF1 molecule comprises:
[0123] (b) a first region comprising an Anellovirus ORF1 structural jelly-roll region, e.g., an amino acid sequence having at least 30% (e.g., at least about 30, 35, 40, 50, 60, 70, 80, 90, 95, 96, 97, 98, 99, or 100%) sequence identity to a Anellovirus ORF1 structural jelly-roll region sequence described herein or a sequence comprising at least 6 beta strands;
[0124] (c) a second region comprising an Anellovirus ORF1 structural N22 domain, e.g., an amino acid sequence having at least 30% (e.g., at least about 30, 35, 40, 50, 60, 70, 80, 90, 95, 96, 97, 98, 99, or 100%) sequence identity to an Anellovirus ORF1 structural N22 domain sequence described herein; and
[0125] (d) a third region comprising an Anellovirus ORF1 structural C-terminal domain (CTD), e.g., an amino acid sequence having at least 30% (e.g., at least about 30, 35, 40, 50, 60, 70, 80, 90, 95, 96, 97, 98, 99, or 100%) sequence identity to an Anellovirus ORF1 CTD sequence described herein; and
[0126] wherein the Anellovirus ORF1 molecule does not comprise an Anellovirus ORF1 structural arginine-rich region, e.g., a sequence of at least about 40 amino acids comprising at least 60%, 70%, or 80% basic residues (e.g., arginine, lysine, or a combination thereof).
[0127] 38. A preparation comprising the particle of any of the preceding embodiments.
[0128] 39. The preparation of embodiment 38, wherein the preparation comprises less than 10¹⁰-10¹⁴ (e.g., less than 10¹⁰-10¹¹, 10¹¹-10¹², 10¹²-10¹³, or 10¹³-10¹⁴) viral genome equivalents of nucleic acid molecules (e.g., genetic elements, e.g., of an anellovector as described herein) per kilogram of a subject to be administered the composition (e.g., as determined by qPCR or by measuring optical density).
[0129] 40. A polypeptide, e.g., an Anellovirus ORF1 molecule, comprising:
[0130] (b) a first region comprising an Anellovirus ORF1 structural jelly-roll region, e.g., an amino acid sequence having at least 30% (e.g., at least about 30, 35, 40, 50, 60, 70, 80, 90, 95, 96, 97, 98, 99, or 100%) sequence identity to a Anellovirus ORF1 structural jelly-roll region sequence described herein or a sequence comprising at least 6 beta strands;
[0131] (c) a second region comprising an Anellovirus ORF1 structural N22 domain, e.g., an amino acid sequence having at least 30% (e.g., at least about 30, 35, 40, 50, 60, 70, 80, 90, 95, 96, 97, 98, 99, or 100%) sequence identity to an Anellovirus ORF1 structural N22 domain sequence described herein; and
[0132] (d) a third region comprising an Anellovirus ORF1 structural C-terminal domain (CTD), e.g., an amino acid sequence having at least 30% (e.g., at least about 30, 35, 40, 50, 60, 70, 80, 90, 95, 96, 97, 98, 99, or 100%) sequence identity to an Anellovirus ORF1 CTD sequence described herein; and
[0133] wherein the polypeptide does not comprise an Anellovirus ORF1 structural arginine-rich region, e.g., a sequence of at least about 40 amino acids comprising at least 60%, 70%, or 80% basic residues (e.g., arginine, lysine, or a combination thereof).
[0134] 41. A nucleic acid molecule encoding a polypeptide of embodiment 40.
[0135] 42. A particle comprising a proteinaceous exterior comprising an Anellovirus ORF1 molecule, wherein the ORF1 molecule comprises an ORF1 domain and an exogenous surface domain;
[0136] wherein the particle is made by contacting a plurality of Anellovirus ORF1 molecules in a cell-free solution under conditions suitable to form a proteinaceous exterior comprising the plurality of Anellovirus ORF1 molecules.
[0137] 43. The particle of embodiment 42, wherein the particle does not comprise (e.g., does not enclose) a polynucleotide, or does not comprise (e.g., does not enclose) a polynucleotide of greater than 1000, 500, 200, or 100 nucleotides in length.
[0138] 44. A method of making a particle, the method comprising:
[0139] contacting a plurality of Anellovirus ORF1 molecules in a cell-free solution under conditions suitable to form a proteinaceous exterior comprising the plurality of Anellovirus ORF1 molecules;
[0140] thereby making a particle.
[0141] 45. A method of modulating a biological activity in a cell, the method comprising: contacting the cell with a particle of any of the proceeding embodiments;
[0142] wherein the cell comprises a moiety on its surface that binds to the exogenous surface moiety of the particle.
[0143] 46. A method of targeting a particle to a cell, the method comprising:
[0144] contacting the cell with a particle of any of the proceeding embodiments;
   wherein the cell comprises a moiety on its surface that binds to the exogenous surface moiety of the particle.
[0145] 47. A polypeptide comprising (e.g., in an N to C-terminal direction):
   [0146] (i) a structural jelly-roll region of an Anellovirus ORF1 molecule;
   [0147] (ii) a structural N22 domain of an Anellovirus ORF1 molecule; and
   [0148] (iii) a portion of a structural C-terminal domain (CTD) of an Anellovirus ORF1 molecule, which comprises a deletion of about 20-30, 30-40 (e.g., about 37), 40-50 (e.g., about 55), 50-60, 60-70, 70-80, 80-90, 90-100, 100-110, 110-120, 120-130 (e.g., about 129), 130-140 (e.g., about 131), 140-150 (e.g., about 148), or 150-160 (e.g., about 155) amino acids at the C-terminal end of the structural CTD, relative to a corresponding wild-type structural CTD of the Anellovirus ORF1 molecule.
[0149] 48. A polypeptide comprising (e.g., in an N to C-terminal direction):
   [0150] (i) optionally a first portion of a structural jelly-roll region (e.g., comprising beta strands B—H of the structural jelly-roll region) of an Anellovirus ORF1 molecule;
   [0151] (ii) a first portion of a P1 domain of an Anellovirus ORF1 molecule (e.g., a P1-1 domain as described herein);
   [0152] (iii) a P2 domain of an Anellovirus ORF1 molecule;
   [0153] (iv) a second portion of a P1 domain of an Anellovirus ORF1 molecule (e.g., a P1-2 domain as described herein);
   [0154] (v) optionally a second portion of a structural jelly-roll region (e.g., comprising beta strand I of the structural jelly-roll region) of an Anellovirus ORF1 molecule; and
   [0155] (vi) a portion of a structural C-terminal domain (CTD) of an Anellovirus ORF1 molecule, which comprises a deletion of about 20-30, 30-40 (e.g., about 37), 40-50 (e.g., about 55), 50-60, 60-70, 70-80, 80-90, 90-100, 100-110, 110-120, 120-130 (e.g., about 129), 130-140 (e.g., about 131), 140-150 (e.g., about 148), or 150-160 (e.g., about 155) amino acids at the C-terminal end of the structural CTD, relative to a corresponding wild-type structural CTD of the Anellovirus ORF1 molecule.
[0156] 49. A polypeptide comprising (e.g., in an N to C-terminal direction):
   [0157] (i) a structural jelly-roll region of an Anellovirus ORF1 molecule;
   [0158] (ii) an structural N22 domain of an Anellovirus ORF1 molecule; and
   [0159] (iii) a portion of a structural CTD of an Anellovirus ORF1 molecule, wherein the portion consists of the N-terminal-most 1-5, 5-10 (e.g. about 7), 10-20, 30-40, 40-50, 50-60 (e.g. about 52), 60-70 (e.g., about 69), 70-80, 80-90 (e.g., about 88), 90-100 (e.g., about 93), or 100-110 amino acids of a corresponding wild-type structural CTD of an Anellovirus ORF1 molecule, or a sequence having at least 80%, 85%, 90%, 95%, 96%, 97%, 98%, or 99% identity thereto.
[0160] 50. A polypeptide comprising (e.g., in an N to C-terminal direction):
   [0161] (i) optionally a first portion of a structural jelly-roll region (e.g., comprising beta strands B—H of the structural jelly-roll region) of an Anellovirus ORF1 molecule;
   [0162] (ii) a first portion of a P1 domain of an Anellovirus ORF1 molecule (e.g., a P1-1 domain as described herein);
   [0163] (iii) a P2 domain of an Anellovirus ORF1 molecule;
   [0164] (iv) a second portion of a P1 domain of an Anellovirus ORF1 molecule (e.g., a P1-2 domain as described herein);
   [0165] (v) optionally a second portion of a structural jelly-roll region (e.g., comprising beta strand I of the structural jelly-roll region) of an Anellovirus ORF1 molecule; and
   [0166] (vi) a portion of a structural CTD of an Anellovirus ORF1 molecule, wherein the portion consists of the N-terminal most 1-5, 5-10 (e.g. about 7), 10-20, 30-40, 40-50, 50-60 (e.g. about 52), 60-70 (e.g., about 69), 70-80, 80-90 (e.g., about 88), 90-100 (e.g., about 93), or 100-110 amino acids of a corresponding wild-type structural CTD of an Anellovirus ORF1 molecule, or a sequence having at least 80%, 85%, 90%, 95%, 96%, 97%, 98%, or 99% identity thereto.
[0167] 51. A polypeptide comprising (e.g., in an N to C-terminal direction):
   [0168] (i) a structural jelly-roll region of an Anellovirus ORF1 molecule comprising the structural jelly-roll sequence of a Ring2, Ring9, Ring10, Ring 18, or Ring19 Anellovirus ORF1 protein (e.g., as described herein), or an amino acid sequence having at least 75%, 80%, 85%, 90%, 95%, 96%, 97%, 98%, or 99% identity thereto; and
   [0169] (ii) a full-length structural N22 domain of an Anellovirus ORF1 molecule comprising the structural N22 sequence of the Ring2, Ring9, Ring10, Ring 18, or Ring19 Anellovirus ORF1 protein, or an amino acid sequence having at least 75%, 80%, 85%, 90%, 95%, 96%, 97%, 98%, or 99% identity thereto;
   [0170] wherein the polypeptide does not comprise the amino acid sequence of the full-length structural C-terminal domain of the Ring2, Ring9, Ring10, Ring 18, or Ring19 Anellovirus ORF1 protein.
[0171] 52. A polypeptide comprising (e.g., in an N to C-terminal direction):
   [0172] (i) optionally the amino acid sequence of beta strands B—H of the structural jelly-roll region of a Ring2, Ring9, Ring10, Ring 18, or Ring19 Anellovirus ORF1 protein (e.g., as described herein), or an amino acid sequence having at least 75%, 80%, 85%, 90%, 95%, 96%, 97%, 98%, or 99% identity thereto;
   [0173] (ii) the amino acid sequence of a full-length P1-1 domain of the Ring2, Ring9, Ring10, Ring 18, or Ring19 Anellovirus ORF1 protein, or an amino acid sequence having at least 75%, 80%, 85%, 90%, 95%, 96%, 97%, 98%, or 99% identity thereto;
   [0174] (iii) the amino acid sequence of a full-length P2 domain of the Ring2, Ring9, Ring10, Ring 18, or Ring19 Anellovirus ORF1 protein, or an amino acid sequence having at least 75%, 80%, 85%, 90%, 95%, 96%, 97%, 98%, or 99% identity thereto;
   [0175] (iv) the amino acid sequence of a full-length P1-2 domain of the Ring2, Ring9, Ring10, Ring 18, or Ring19 Anellovirus ORF1 protein, or an amino acid sequence having at least 75%, 80%, 85%, 90%, 95%, 96%, 97%, 98%, or 99% identity thereto; and
   [0176] (v) optionally the amino acid sequence of beta strand I of the structural jelly-roll region of the Ring2, Ring9, Ring10, Ring 18, or Ring19 Anellovirus ORF1 protein (e.g., as described herein), or an amino acid sequence having at least 75%, 80%, 85%, 90%, 95%, 96%, 97%, 98%, or 99% identity thereto;
   [0177] wherein the polypeptide does not comprise the amino acid sequence of the full-length structural C-terminal domain of the Ring2, Ring9, Ring10, Ring 18, or Ring19 Anellovirus ORF1 protein.
[0178] 53. The polypeptide of embodiment 51 or 52, which comprises a fragment of the structural C-terminal domain.
[0179] 54. The polypeptide of embodiment 51 or 52, which does not comprise a fragment of the structural C-terminal domain.
[0180] 55. The polypeptide of any of embodiments 47-54, which further comprises (e.g., at the C-terminal end of the C-terminal P1 subdomain sequence) a structural jelly-roll I region of an Anellovirus ORF1 molecule comprising the structural jelly-roll I sequence as listed in Table A2, or an amino acid sequence having at least 75%, 80%, 85%, 90%, 95%, 96%, 97%, 98%, or 99% identity thereto.
[0181] 56. The polypeptide of any of embodiments 47-55, wherein the polypeptide does not comprise the 1, 2, 3, 4, 5, 6, 7, 8, 9 or 10 most N-terminal amino acid residues of the structural jelly-roll B—H region of the Anellovirus ORF1 molecule.
[0182] 57. The polypeptide of any of the preceding embodiments, further comprising a structural arginine-rich domain of an Anellovirus ORF1 molecule, e.g., wherein the structural arginine-rich domain is N-terminal of the structural jelly-roll region.
[0183] 58. The polypeptide of any of embodiments 47-57, further comprising an amino acid sequence having at least 70% (e.g., at least about 70, 80, 90, 95, 96, 97, 98, 99, or 100%) sequence identity to a structural arginine-rich region sequence described herein, or a sequence of at least about 40 amino acids comprising at least 60%, 70%, or 80% basic residues.
[0184] 59. The polypeptide of any of embodiments 47-58, wherein the polypeptide further comprises a deletion of a structural arginine-rich region of an Anellovirus ORF1 molecule.
[0185] 60. The polypeptide of any of embodiments 47-59, wherein the polypeptide comprises a deletion of 35-40, 40-45, 45-50, 50-55, 55-60, 60-65, or 65-70 amino acids (e.g., 37, 40, 43, 44, 47 49, 66, or 67 amino acids) relative to a corresponding wild-type arginine-rich region of an Anellovirus ORF1 molecule.
[0186] 61. The polypeptide of any of embodiments 47-60, wherein the polypeptide does not comprise a structural arginine-rich region of an Anellovirus ORF1 molecule.
[0187] 62. The polypeptide of any of the preceding embodiments, wherein the polypeptide does not comprise a sequence of at least 60 contiguous amino acids consisting of at least 40%, 45%, 50%, 55%, 60%, 65%, 70%, or 75% (e.g., up to 80%) basic residues.
[0188] 63. The polypeptide of any of the preceding embodiments, wherein the polypeptide does not comprise a sequence of at least 60 contiguous amino acids consisting of at least 40%, 45%, 50%, 55%, 60%, 65%, or 75% (e.g., up to 80%) arginine residues.
[0189] 64. The polypeptide of any of the preceding embodiments, wherein the polypeptide does not comprise a sequence of at least 60 contiguous amino acids consisting of at least 2%, 3%, 4%, 5%, 10%, or 15% (e.g., up to 20%) lysine residues.
[0190] 65. The polypeptide of any of the preceding embodiments, wherein the polypeptide does not comprise a sequence of at least 35, 36, 37, 38, 39, 40, 41, 42, 43, 44, 45, 46, 47, 48, 49, 50, 51, 52, 53, 54, 55, 56, 57, 58, 59, 60, 61, 62, 63, 64, 65, 66, 67, 68, 69, or 70 contiguous amino acids consisting of at least 40%, 41%, 42%, 43%, 44%, 45%, 46%, 47%, 48%, 49%, 50%, 51%, 52%, 53%, 54%, 55%, 56%, 57%, 58%, 59%, or 60% arginine residues.
[0191] 66. The polypeptide of any of the preceding embodiments, further comprising a structural hypervariable region (HVR) of an Anellovirus ORF1 molecule (e.g., situated between the structural jelly-roll region and the structural N22 domain).
[0192] 67. A polypeptide comprising (e.g., in an N-terminal to C-terminal direction):
   [0193] (i) a structural jelly-roll region of an Anellovirus ORF1 molecule; and
   [0194] (ii) an structural N22 domain of an Anellovirus ORF1 molecule; and
   [0195] wherein the polypeptide lacks a structural C-terminal domain (CTD) of an Anellovirus ORF1 molecule.
[0196] 68. A polypeptide comprising (e.g., in an N-terminal to C-terminal direction):
   [0197] (i) optionally a first portion of a structural jelly-roll region (e.g., comprising beta strands B—H of the structural jelly-roll region) of an Anellovirus ORF1 molecule;
   [0198] (ii) a first portion of a P1 domain of an Anellovirus ORF1 molecule (e.g., a P1-1 domain as described herein);
   [0199] (iii) a P2 domain of an Anellovirus ORF1 molecule;
   [0200] (iv) a second portion of a P1 domain of an Anellovirus ORF1 molecule (e.g., a P1-2 domain as described herein);
   [0201] (v) optionally a second portion of a structural jelly-roll region (e.g., comprising beta strand I of the structural jelly-roll region) of an Anellovirus ORF1 molecule; and
   [0202] wherein the polypeptide lacks a structural C-terminal domain (CTD) of an Anellovirus ORF1 molecule.
[0203] 69. A polypeptide comprising (e.g., in an N-terminal to C-terminal direction):
   [0204] (i) a structural jelly-roll region of an Anellovirus ORF1 molecule, or an amino acid sequence having at least 75%, 80%, 85%, 90%, 95%, 96%, 97%, 98%, or 99% identity thereto; and
   [0205] (ii) an structural N22 domain of an Anellovirus ORF1 molecule, or an amino acid sequence having at least 75%, 80%, 85%, 90%, 95%, 96%, 97%, 98%, or 99% identity thereto; and
   [0206] wherein the polypeptide lacks a structural arginine-rich region of an Anellovirus ORF1 molecule.
[0207] 70. A polypeptide comprising (e.g., in an N-terminal to C-terminal direction):
   [0208] (i) optionally a first portion of a structural jelly-roll region (e.g., comprising beta strands B—H of the structural jelly-roll region) of an Anellovirus ORF1 molecule;
   [0209] (ii) a first portion of a P1 domain of an Anellovirus ORF1 molecule (e.g., a P1-1 domain as described herein);
   [0210] (iii) a P2 domain of an Anellovirus ORF1 molecule;
   [0211] (iv) a second portion of a P1 domain of an Anellovirus ORF1 molecule (e.g., a P1-2 domain as described herein);
   [0212] (v) optionally a second portion of a structural jelly-roll region (e.g., comprising beta strand I of the structural jelly-roll region) of an Anellovirus ORF1 molecule; and
   [0213] wherein the polypeptide lacks a structural arginine-rich region of an Anellovirus ORF1 molecule.
[0214] 71. A polypeptide comprising (e.g., in an N-terminal to C-terminal direction):
   [0215] (i) a portion of a full-length structural jelly-roll region of an Anellovirus ORF1 molecule, which does not comprise the 1-10 (e.g., 7) N-terminal-most amino acids of the full-length structural jelly-roll region; and
   [0216] (ii) an structural N22 domain of the Anellovirus ORF1 molecule; and
   [0217] wherein the polypeptide lacks a structural arginine-rich region of the Anellovirus ORF1 molecule.
[0218] 72. A polypeptide comprising (e.g., in an N-terminal to C-terminal direction):
   [0219] (i) a portion of the full-length beta strands B—H of the structural jelly-roll region of an Anellovirus ORF1 molecule, which does not comprise the 1-10 (e.g., 7) N-terminal-most amino acids of the full-length beta strands B—H of the structural jelly-roll region;
   [0220] (ii) a first portion of a P1 domain of an Anellovirus ORF1 molecule (e.g., a P1-1 domain as described herein);
   [0221] (iii) a P2 domain of an Anellovirus ORF1 molecule;
   [0222] (iv) a second portion of a P1 domain of an Anellovirus ORF1 molecule (e.g., a P1-2 domain as described herein);
   [0223] (v) optionally a second portion of a structural jelly-roll region (e.g., comprising beta strand I of the structural jelly-roll region) of an Anellovirus ORF1 molecule; and
   [0224] wherein the polypeptide lacks a structural arginine-rich region of the Anellovirus ORF1 molecule.
[0225] 73. The polypeptide of embodiment 71 or 72, wherein the Anellovirus ORF1 molecule is a Ring2 ORF1 molecule.
[0226] 74. The polypeptide of embodiment 71 or 72, wherein the Anellovirus ORF1 molecule is a Ring9 ORF1 molecule.
[0227] 75. The polypeptide of embodiment 71 or 72, wherein the Anellovirus ORF1 molecule is a Ring10 ORF1 molecule.
[0228] 76. The polypeptide of embodiment 71 or 72, wherein the Anellovirus ORF1 molecule is a Ring18 ORF1 molecule.
[0229] 77. The polypeptide of embodiment 71 or 72, wherein the Anellovirus ORF1 molecule is a Ring19 ORF1 molecule.
[0230] 78. The polypeptide of any of embodiments 69-77, wherein the polypeptide does not comprise the 1, 2, 3, 4, 5, 6, 7, 8, 9 or 10 most N-terminal amino acid residues of the structural jelly-roll region of the Anellovirus ORF1 molecule.
[0231] 79. A polypeptide comprising:
   [0232] (i) a structural jelly-roll region of an Anellovirus ORF1 molecule;
   [0233] (ii) an structural N22 domain of an Anellovirus ORF1 molecule; and
   [0234] (iii) an amino acid sequence comprising substitutions of at least 50%, 60%, 70%, 80%, or 90% of basic amino acids relative to the structural arginine-rich region of a wild-type Anellovirus ORF1 molecule.
[0235] 80. A polypeptide comprising:
   [0236] (i) optionally a first portion of a structural jelly-roll region (e.g., comprising beta strands B—H of the structural jelly-roll region) of an Anellovirus ORF1 molecule;
   [0237] (ii) a first portion of a P1 domain of an Anellovirus ORF1 molecule (e.g., a P1-1 domain as described herein);
   [0238] (iii) a P2 domain of an Anellovirus ORF1 molecule;
   [0239] (iv) a second portion of a P1 domain of an Anellovirus ORF1 molecule (e.g., a P1-2 domain as described herein);
   [0240] (v) optionally a second portion of a structural jelly-roll region (e.g., comprising beta strand I of the structural jelly-roll region) of an Anellovirus ORF1 molecule; and
   [0241] (vi) an amino acid sequence comprising substitutions of at least 50%, 60%, 70%, 80%, or 90% of basic amino acids relative to the structural arginine-rich region of a wild-type Anellovirus ORF1 molecule.
[0242] 81. The polypeptide of embodiment 79 or 80, wherein (iii) comprises one or more (e.g., 1, 2, 3, 4, 5, 6, 7, 8, 9, or 10) mutations of lysine to histidine relative to the structural arginine-rich region of the wild-type Anellovirus ORF1 molecule.
[0243] 82. The polypeptide of embodiment 79 or 80, which comprises the amino acid sequencenumbered 1721 in Table B4-2, or an amino acid sequence having at least 75%, 80%, 85%, 90%, 95%, 96%, 97%, 98%, or 99% identity thereto.
[0244] 83. The polypeptide of embodiment 79, wherein the amino acid sequence of (iii) further comprises one or more substitutions at one or more acidic, hydrophobic, and/or nonpolar amino acids of the structural arginine-rich region of the wild-type Anellovirus ORF1 molecule.
[0245] 84. The polypeptide of any of embodiments 69-83, which further comprises a structural CTD, e.g., C-terminal of the structural N22 domain.
[0246] 85. The polypeptide of any of embodiments 69-84, which further comprises a structural HVR, e.g., situated between the structural jelly-roll region and the structural N22 domain.
[0247] 86. The polypeptide of any of embodiments 69-85, which does not substantially bind DNA.
[0248] 87. The polypeptide of any of embodiments 69-86, further comprising (e.g., at the N-terminus) an N-terminal portion of a capsid protein from a virus other than an Anellovirus, or an amino acid sequence having at least 75%, 80%, 85%, 90%, 95%, 96%, 97%, 98%, or 99% identity thereto;
   [0249] optionally wherein the N-terminal region of the capsid protein from the virus other than an Anellovirus comprises at least the N-terminal 10, 20, 30, 40, 41, 42, 43, 44, 45, 46, 47, 48, 49, 50, 55, or 60 amino acids of the capsid protein.
[0250] 88. The polypeptide of any of embodiments 69-87, further comprising (e.g., at the N-terminus) a structural arginine-rich motif of a capsid protein from a virus other than an Anellovirus, or an amino acid sequence having at least 75%, 80%, 85%, 90%, 95%, 96%, 97%, 98%, or 99% identity thereto.
[0251] 89. The polypeptide of embodiment 88, wherein the virus other than an Anellovirus is beak and feather disease virus (BFDV).
[0252] 90. The polypeptide of any of embodiments 69-89, further comprising (e.g., at the N-terminus) the amino acid sequence MWGTSNCACAKFQIRRRYARPYRRRHIRRYRRRRRHFRRRRFTTNR (SEQ ID NO: 2617), or an amino acid sequence having at least 75%, 80%, 85%, 90%, 95%, 96%, 97%, 98%, or 99% identity thereto.
[0253] 91. A polypeptide comprising (e.g., in an N-terminal to C-terminal direction):
   [0254] (i) a structural arginine-rich region of a first Anellovirus ORF1 molecule, or an amino acid sequence having at least 75%, 80%, 85%, 90%, 95%, 96%, 97%, 98%, or 99% identity thereto;
   [0255] (ii) a structural jelly-roll region of a second Anellovirus ORF1 molecule, or an amino acid sequence having at least 75%, 80%, 85%, 90%, 95%, 96%, 97%, 98%, or 99% identity thereto; and
   [0256] (iii) an structural N22 domain of the second Anellovirus ORF1 molecule, or an amino acid sequence having at least 75%, 80%, 85%, 90%, 95%, 96%, 97%, 98%, or 99% identity thereto;
   [0257] wherein the sequence of (i) comprises at least one amino acid sequence difference relative to the structural arginine-rich region of the second Anellovirus ORF1 molecule.
[0258] 92. A polypeptide comprising (e.g., in an N-terminal to C-terminal direction):
   [0259] (i) a structural arginine-rich region of a first Anellovirus ORF1 molecule, or an amino acid sequence having at least 75%, 80%, 85%, 90%, 95%, 96%, 97%, 98%, or 99% identity thereto;
   [0260] (ii) optionally a first portion of a structural jelly-roll region (e.g., comprising beta strands B—H of the structural jelly-roll region) of a second Anellovirus ORF1 molecule;
   [0261] (iii) a first portion of a P1 domain of a second Anellovirus ORF1 molecule (e.g., a P1-1 domain as described herein);
   [0262] (iv) a P2 domain of a second Anellovirus ORF1 molecule;
   [0263] (v) a second portion of a P1 domain of a second Anellovirus ORF1 molecule (e.g., a P1-2 domain as described herein);
   [0264] (vi) optionally a second portion of a structural jelly-roll region (e.g., comprising beta strand I of the structural jelly-roll region) of a second Anellovirus ORF1 molecule; and
   [0265] wherein the sequence of (i) comprises at least one amino acid sequence difference relative to the structural arginine-rich region of the second Anellovirus ORF1 molecule.
[0266] 93. The polypeptide of embodiment 91 or 92, wherein (i) comprises the structural arginine-rich region of the first Anellovirus ORF1 molecule, or an amino acid sequence having at least 90% identity thereto.
[0267] 94. The polypeptide of embodiment 91 or 92, wherein (i) comprises the structural arginine-rich region of the first Anellovirus ORF1 molecule, or an amino acid sequence having at least 95% identity thereto.
[0268] 95. The polypeptide of embodiment 91 or 92, wherein (i) comprises the structural arginine-rich region of the first Anellovirus ORF1 molecule, or an amino acid sequence having at least 97% identity thereto.
[0269] 96. The polypeptide of embodiment 91 or 92, wherein (i) has 100% sequence identity to the structural arginine-rich region of the first Anellovirus ORF1 molecule.
[0270] 97. The polypeptide of any of embodiments 91-96, wherein the first Anellovirus ORF1 molecule is Ring 9 and the second Anellovirus ORF1 molecule is Ring 2.
[0271] 98. The polypeptide of any of embodiments 91-97, wherein the first Anellovirus ORF1 molecule is Ring 2 and the second Anellovirus ORF1 molecule is Ring 9.
[0272] 99. A polypeptide comprising (e.g., in an N-terminal to C-terminal direction):
   [0273] (i) an N-terminal portion of a first Anellovirus ORF1 molecule, or an amino acid sequence having at least 75%, 80%, 85%, 90%, 95%, 96%, 97%, 98%, or 99% identity thereto, wherein the N-terminal portion of the first Anellovirus ORF1 molecule has a length of between 30-40, 40-50, 50-60, 60-70, 70-80, or 80-90 amino acids; and
   [0274] (ii) a C-terminal portion of a second Anellovirus ORF1 molecule, or an amino acid sequence having at least 75%, 80%, 85%, 90%, 95%, 96%, 97%, 98%, or 99% identity thereto, wherein the C-terminal portion of the second Anellovirus ORF1 molecule has a length of between 590-600, 600-610, 610-620, 620-630, 630-640, 640-650, 650-660, 660-670, 670-680, 680-690, 690-700, 700-710, 710-720, or 720-730 amino acids; and
   [0275] wherein the sequence of (i) comprises at least one amino acid sequence difference relative to the structural arginine-rich region of the second Anellovirus ORF1 molecule.
[0276] 100. The polypeptide of embodiment 99, wherein the N-terminal portion of the first Anellovirus ORF1 molecule comprises a structural arginine-rich domain.
[0277] 101. The polypeptide of embodiment 99 or 100, wherein the N-terminal portion of the first Anellovirus ORF1 molecule further comprises an N-terminal portion of a structural jelly-roll domain (e.g., having a length of between 1-10, 10-20, 20-30, 30-40, or 40-50 amino acids).
[0278] 102. The polypeptide of any of embodiments 99-101, wherein the N-terminal portion of the first Anellovirus ORF1 molecule further comprises one or more beta strands of a structural jelly-roll domain (e.g., beta strands 1 and/or 2 of the structural jelly-roll domain).
[0279] 103. The polypeptide of any of embodiments 99-102, wherein the C-terminal portion of the second Anellovirus ORF1 molecule comprises a C-terminal portion of a structural jelly-roll domain (e.g., having a length of between 100-110, 110-120, 120-130, 130-140, 140-150, 150-160, 160-170, 170-180, 180-190, or 190-200 amino acids).
[0280] 104. A polypeptide comprising (e.g., in an N-terminal to C-terminal direction):
   [0281] (i) a first portion of a structural jelly-roll region of a first Anellovirus ORF1 molecule, or an amino acid sequence having at least 75%, 80%, 85%, 90%, 95%, 96%, 97%, 98%, or 99% identity thereto; and
   [0282] (ii) a second portion of a structural jelly-roll region of a second Anellovirus ORF1 molecule, or an amino acid sequence having at least 75%, 80%, 85%, 90%, 95%, 96%, 97%, 98%, or 99% identity thereto; and
   [0283] wherein the sequence of (i) and (ii) together comprises at least one amino acid sequence difference relative to each of the sequences of the structural jelly-roll region of the first Anellovirus ORF1 molecule and the second Anellovirus ORF1 molecule.
[0284] 105. A polypeptide comprising (e.g., in an N-terminal to C-terminal direction):
   [0285] (i) a structural jelly-roll region of an Anellovirus ORF1 molecule; and
   [0286] (ii) an structural N22 domain of an Anellovirus ORF1 molecule; and
   [0287] wherein the polypeptide lacks a structural arginine-rich region of an Anellovirus ORF1 molecule; and
   [0288] wherein the polypeptide lacks a structural C-terminal domain of an Anellovirus ORF1 molecule.
[0289] 106. A polypeptide comprising (e.g., in an N-terminal to C-terminal direction):
   [0290] (i) optionally a first portion of a structural jelly-roll region (e.g., comprising beta strands B—H of the structural jelly-roll region) of an Anellovirus ORF1 molecule;
   [0291] (ii) a first portion of a P1 domain of an Anellovirus ORF1 molecule (e.g., a P1-1 domain as described herein);
   [0292] (iii) a P2 domain of an Anellovirus ORF1 molecule;
   [0293] (iv) a second portion of a P1 domain of an Anellovirus ORF1 molecule (e.g., a P1-2 domain as described herein);
   [0294] (v) optionally a second portion of a structural jelly-roll region (e.g., comprising beta strand I of the structural jelly-roll region) of an Anellovirus ORF1 molecule; and
   [0295] wherein the polypeptide lacks a structural arginine-rich region of an Anellovirus ORF1 molecule; and
   [0296] wherein the polypeptide lacks a structural C-terminal domain of an Anellovirus ORF1 molecule.
[0297] 107. The polypeptide of any of the preceding embodiments, wherein the polypeptide does not comprise amino acids 2-45 of the amino acid sequence of a Ring2 ORF1 protein as described herein, or an amino acid sequence having at least 75%, 80%, 85%, 90%, 95%, 96%, 97%, 98%, or 99% identity thereto.
[0298] 108. The polypeptide of any of the preceding embodiments, wherein the polypeptide does not comprise amino acids 518-666 of the amino acid sequence of a Ring2 ORF1 protein as described herein, or an amino acid sequence having at least 75%, 80%, 85%, 90%, 95%, 96%, 97%, 98%, or 99% identity thereto.
[0299] 109. The polypeptide of any of the preceding embodiments, wherein the polypeptide does not comprise amino acids 538-666 of the amino acid sequence of a Ring2 ORF1 protein as described herein, or an amino acid sequence having at least 75%, 80%, 85%, 90%, 95%, 96%, 97%, 98%, or 99% identity thereto.
[0300] 110. The polypeptide of any of the preceding embodiments, wherein the polypeptide does not comprise amino acids 545-666 of the amino acid sequence of a Ring2 ORF1 protein as described herein, or an amino acid sequence having at least 75%, 80%, 85%, 90%, 95%, 96%, 97%, 98%, or 99% identity thereto.
[0301] 111. The polypeptide of any of the preceding embodiments, wherein the polypeptide does not comprise amino acids 594-666 of the amino acid sequence of a Ring2 ORF1 protein as described herein, or an amino acid sequence having at least 75%, 80%, 85%, 90%, 95%, 96%, 97%, 98%, or 99% identity thereto.
[0302] 112. The polypeptide of any of the preceding embodiments, wherein the polypeptide does not comprise amino acids 611-666 of the amino acid sequence of a Ring2 ORF1 protein as described herein, or an amino acid sequence having at least 75%, 80%, 85%, 90%, 95%, 96%, 97%, 98%, or 99% identity thereto.
[0303] 113. The polypeptide of any of the preceding embodiments, wherein the polypeptide does not comprise amino acids 630-666 of the amino acid sequence of a Ring2 ORF1 protein as described herein, or an amino acid sequence having at least 75%, 80%, 85%, 90%, 95%, 96%, 97%, 98%, or 99% identity thereto.
[0304] 114. The polypeptide of any of the preceding embodiments, wherein the polypeptide does not comprise amino acids 2-45 of the amino acid sequence of a Ring10 ORF1 protein as described herein, or an amino acid sequence having at least 75%, 80%, 85%, 90%, 95%, 96%, 97%, 98%, or 99% identity thereto.
[0305] 115. The polypeptide of any of the preceding embodiments, wherein the polypeptide does not comprise amino acids 2-51 of the amino acid sequence of a Ring10 ORF1 protein as described herein, or an amino acid sequence having at least 75%, 80%, 85%, 90%, 95%, 96%, 97%, 98%, or 99% identity thereto.
[0306] 116. The polypeptide of any of the preceding embodiments, wherein the polypeptide does not comprise amino acids 542-672 of the amino acid sequence of a Ring10 ORF1 protein as described herein, or an amino acid sequence having at least 75%, 80%, 85%, 90%, 95%, 96%, 97%, 98%, or 99% identity thereto.
[0307] 117. The polypeptide of any of the preceding embodiments, wherein the polypeptide does not comprise amino acids 552-672 of the amino acid sequence of a Ring10 ORF1 protein as described herein, or an amino acid sequence having at least 75%, 80%, 85%, 90%, 95%, 96%, 97%, 98%, or 99% identity thereto.
[0308] 118. The polypeptide of any of the preceding embodiments, wherein the polypeptide does not comprise amino acids 557-672 of the amino acid sequence of a Ring10 ORF1 protein as described herein, or an amino acid sequence having at least 75%, 80%, 85%, 90%, 95%, 96%, 97%, 98%, or 99% identity thereto.
[0309] 119. The polypeptide of any of the preceding embodiments, wherein the polypeptide does not comprise amino acids 560-672 of the amino acid sequence of a Ring10 ORF1 protein as described herein, or an amino acid sequence having at least 75%, 80%, 85%, 90%, 95%, 96%, 97%, 98%, or 99% identity thereto.
[0310] 120. The polypeptide of any of the preceding embodiments, wherein the polypeptide does not comprise amino acids 566-672 of the amino acid sequence of a Ring10 ORF1 protein as described herein, or an amino acid sequence having at least 75%, 80%, 85%, 90%, 95%, 96%, 97%, 98%, or 99% identity thereto.
[0311] 121. The polypeptide of any of the preceding embodiments, wherein the polypeptide does not comprise amino acids 569-672 of the amino acid sequence of a Ring10 ORF1 protein as described herein, or an amino acid sequence having at least 75%, 80%, 85%, 90%, 95%, 96%, 97%, 98%, or 99% identity thereto.
[0312] 122. The polypeptide of any of the preceding embodiments, wherein the polypeptide does not comprise amino acids 610-672 of the amino acid sequence of a Ring10 ORF1 protein as described herein, or an amino acid sequence having at least 75%, 80%, 85%, 90%, 95%, 96%, 97%, 98%, or 99% identity thereto.
[0313] 123. The polypeptide of any of the preceding embodiments, wherein the polypeptide does not comprise amino acids 2-69 of the amino acid sequence of a Ring18 ORF1 protein as described herein, or an amino acid sequence having at least 75%, 80%, 85%, 90%, 95%, 96%, 97%, 98%, or 99% identity thereto.
[0314] 124. The polypeptide of any of the preceding embodiments, wherein the polypeptide does not comprise amino acids 582-736 of the amino acid sequence of a Ring18 ORF1 protein as described herein, or an amino acid sequence having at least 75%, 80%, 85%, 90%, 95%, 96%, 97%, 98%, or 99% identity thereto.
[0315] 125. The polypeptide of any of the preceding embodiments, wherein the polypeptide does not comprise amino acids 651-736 of the amino acid sequence of a Ring18 ORF1 protein as described herein, or an amino acid sequence having at least 75%, 80%, 85%, 90%, 95%, 96%, 97%, 98%, or 99% identity thereto.
[0316] 126. The polypeptide of any of the preceding embodiments, wherein the polypeptide does not comprise amino acids 2-49 of the amino acid sequence of a Ring19 ORF1 protein as described herein, or an amino acid sequence having at least 75%, 80%, 85%, 90%, 95%, 96%, 97%, 98%, or 99% identity thereto.
[0317] 127. The polypeptide of any of the preceding embodiments, wherein the polypeptide does not comprise amino acids 527-655 of the amino acid sequence of a Ring19 ORF1 protein as described herein, or an amino acid sequence having at least 75%, 80%, 85%, 90%, 95%, 96%, 97%, 98%, or 99% identity thereto.
[0318] 128. The polypeptide of any of the preceding embodiments, wherein the polypeptide does not comprise amino acids 537-655 of the amino acid sequence of a Ring19 ORF1 protein as described herein, or an amino acid sequence having at least 75%, 80%, 85%, 90%, 95%, 96%, 97%, 98%, or 99% identity thereto.
[0319] 129. The polypeptide of any of the preceding embodiments, wherein the polypeptide does not comprise amino acids 583-655 of the amino acid sequence of a Ring19 ORF1 protein as described herein, or an amino acid sequence having at least 75%, 80%, 85%, 90%, 95%, 96%, 97%, 98%, or 99% identity thereto.
[0320] 130. The polypeptide of any of the preceding embodiments, wherein the polypeptide does not comprise amino acids 600-655 of the amino acid sequence of a Ring19 ORF1 protein as described herein, or an amino acid sequence having at least 75%, 80%, 85%, 90%, 95%, 96%, 97%, 98%, or 99% identity thereto.
[0321] 131. A polypeptide comprising (e.g., in an N-terminal to C-terminal direction):
   [0322] (i) a mutant ORF1 structural jelly-roll region; and
   [0323] (ii) an structural N22 domain of an Anellovirus ORF1 molecule;
   [0324] wherein the mutant ORF1 structural jelly-roll region comprises one or more mutations (e.g., at least 2, 3, 4, 5, 6, 7, 8, 9, or 10 mutations) in a beta strand relative to the amino acid sequence of a wild-type Anellovirus ORF1 structural jelly-roll region.
[0325] 132. A polypeptide comprising (e.g., in an N-terminal to C-terminal direction):
   [0326] (i) a mutant ORF1 structural jelly-roll region; and
   [0327] (ii) a first portion of a P1 domain of an Anellovirus ORF1 molecule (e.g., a P1-1 domain as described herein);
   [0328] (iii) a P2 domain of an Anellovirus ORF1 molecule;
   [0329] (iv) a second portion of a P1 domain of an Anellovirus ORF1 molecule (e.g., a P1-2 domain as described herein);
   [0330] (v) optionally a second portion of a structural jelly-roll region (e.g., comprising beta strand I of the structural jelly-roll region) of an Anellovirus ORF1 molecule; and
   [0331] wherein the mutant ORF1 structural jelly-roll region comprises one or more mutations (e.g., at least 2, 3, 4, 5, 6, 7, 8, 9, or 10 mutations) in a beta strand relative to the amino acid sequence of a wild-type Anellovirus ORF1 structural jelly-roll region.
[0332] 133. The polypeptide of embodiment 131 or 132, wherein the one or more mutations in the beta strand comprise one or more mutations (e.g., at least 2, 3, 4, 5, 6, 7, 8, 9, or 10 mutations) of a basic residue in the amino acid sequence of the wild-type Anellovirus ORF1 structural jelly-roll region, e.g., to a residue other than a basic residue (e.g., a nonpolar residue or an acidic residue).
[0333] 134. The polypeptide of any of embodiments 131-133, wherein the beta strand is selected from beta strand B, D, G, or I of the wild-type Anellovirus ORF1 structural jelly-roll region.
[0334] 135. The polypeptide of any of embodiments 131-134, wherein the one or more mutations reduce the binding of the polypeptide to a nucleic acid molecule relative to an otherwise similar polypeptide comprising the wild-type Anellovirus ORF1 structural jelly-roll region.
[0335] 136. A polypeptide comprising (e.g., in an N to C-terminal direction):
   [0336] (i) optionally a structural arginine-rich region of an Anellovirus ORF1 (e.g., a full-length arginine-rich region or a portion of a structural arginine-rich region),
   [0337] (ii) a structural jelly-roll region of an Anellovirus ORF1 molecule,
   [0338] (iii) a P1 domain of an Anellovirus ORF1 molecule,
   [0339] (iv) a P2 domain of an Anellovirus ORF1 molecule, and
   [0340] (v) optionally a structural C-terminal domain (CTD) of an Anellovirus ORF1 molecule (e.g., a full-length structural CTD or a portion of a structural CTD);
   [0341] wherein:
      [0342] (a) the P1 domain is from a different Anellovirus than one or more (e.g., 1, 2, 3, or 4) of the structural arginine-rich region, structural jelly-roll region, P2 domain, and/or the structural CTD;
      [0343] (b) the P2 domain is from a different Anellovirus than one or more (e.g., 1, 2, 3, or 4) of the structural arginine-rich region, structural jelly-roll region, P1 domain, and/or the structural CTD; or
      [0344] (c) the P1 domain and the P2 domain are from a different Anellovirus than one or more (e.g., 1, 2, or 3) of the structural arginine-rich region, structural jelly-roll region, and/or the structural CTD, optionally wherein the P1 domain and the P2 domain are from the same Anellovirus.
[0345] 137. A polypeptide comprising (e.g., in an N to C-terminal direction):
   [0346] (i) optionally a structural arginine-rich region of an Anellovirus ORF1 molecule (e.g., a full-length arginine-rich region or a portion of a structural arginine-rich region),
   [0347] (ii) a structural jelly-roll region of an Anellovirus ORF1 molecule,
   [0348] (iii) a P1 domain of an Anellovirus ORF1 molecule,
   [0349] (iv) a P2 domain of a viral capsid protein, wherein the viral capsid protein is not an Anellovirus ORF1 molecule, and
   [0350] (v) optionally a structural C-terminal domain (CTD) of an Anellovirus ORF1 molecule (e.g., a full-length structural CTD or a portion of a structural CTD).
[0351] 138. A polypeptide comprising (e.g., in an N to C-terminal direction):
   [0352] (i) optionally a structural arginine-rich region of an Anellovirus ORF1 (e.g., a full-length arginine-rich region or a portion of a structural arginine-rich region),
   [0353] (ii) a structural jelly-roll region of an Anellovirus ORF1 molecule,
   [0354] (iii) a P1 domain of a viral capsid protein, wherein the viral capsid protein is not an Anellovirus ORF1 molecule,
   [0355] (iv) a P2 domain of an Anellovirus ORF1 molecule, and
   [0356] (v) optionally a structural C-terminal domain (CTD) of an Anellovirus ORF1 molecule (e.g., a full-length structural CTD or a portion of a structural CTD).
[0357] 139. The polypeptide of embodiment 137 or 138, wherein the viral capsid protein is a hepatitis virus capsid protein (e.g., a hepatitis E virus capsid protein).
[0358] 140. A polypeptide comprising (e.g., in an N to C-terminal direction):
   [0359] (i) a portion (e.g., an N-terminal portion) of a viral capsid protein, wherein the viral capsid protein is not from an Anellovirus; and
   [0360] (ii) a P2 domain of an Anellovirus ORF1 molecule (e.g., a wild-type Anellovirus ORF1 protein), or an amino acid sequence having at least 75%, 80%, 85%, 90%, 95%, 96%, 97%, 98%, or 99% amino acid sequence identity thereto.
[0361] 141. The polypeptide of embodiment 140, wherein the viral capsid protein is a hepatitis virus capsid protein (e.g., a hepatitis E virus (HEV) capsid protein), or a protein having at least 75%, 80%, 85%, 90%, 95%, 96%, 97%, 98%, or 99% amino acid sequence identity thereto.
[0362] 142. The polypeptide of embodiment 140 or 141, wherein the portion of the viral capsid protein comprises the amino acid sequence MAVAPAPDTAPVPDVDSRGAILRRQYNLSTSPLTSTIATGTNLVLYAAPLSSLLPLQDGTNTHIM ATEASNYAQYRVVRATIRYRPLVPSAVGGYAISISFWPQTTTTPTSVDMNSITSTDVRILVQPGIAS ELVIPSERLHYRNQGWRSVETSGVAEEEATSGLVMLCIHGSPVNSYTNTPYTGALGLLDFALELE FRNLTPGNTNTRVSRYSSSARHKLRRGPDGTAELTTTAATRFMKDLHFTGTNDVGEVGRGIALT LFNLADTLLGGLPTELISSAGGQLFYSRPVVSANGEPTVKLYTSVENAQQDKGIAIPHDIDLGESR VVIQDYDNQHEQDRPTPSPAPSRP (SEQ ID NO: 2500), or an amino acid sequence having at least 75%, 80%, 85%, 90%, 95%, 96%, 97%, 98%, or 99% amino acid sequence identity thereto.
[0363] 143. The polypeptide of any of embodiments 140-142, wherein the P2 domain of the amino acid sequence comprises the amino acid sequence LNTTYIQNRDWGDRNKTYYCQTLGTQRYFLYGTHSTAQNINDIKLQELIPLTNTQDYVQGFDWT EKDKHNITTYKEFLTKGAGNPFHAEWITAQNPVIHTANSPTQIEQIYTASTTTFQNKKLTDLPTPG YIFITPTV (SEQ ID NO: 2501), or an amino acid sequence having at least 75%, 80%, 85%, 90%, 95%, 96%, 97%, 98%, or 99% amino acid sequence identity thereto.
[0364] 144. The polypeptide of any of embodiments 140-143, further comprising one or more additional portions of the viral capsid protein (e.g., at the C-terminal end of the polypeptide).
[0365] 145. The polypeptide of embodiment 144, wherein the additional portion of the viral capsid protein comprises the amino acid sequence HHHHH (SEQ ID NO: 2502) (e.g., at the C-terminal end of the polypeptide).
[0366] 146. The polypeptide of any of embodiments 136-145, wherein the amino acid sequence of the P1 domain is non-contiguous (e.g., wherein the amino acid sequence of the P2 domain is situated between a first portion and a second portion of the amino acid sequence of the P1 domain).
[0367] 147. A polypeptide comprising (e.g., in an N to C-terminal direction) one or more of:
   [0368] (i) a structural arginine-rich region of an Anellovirus ORF1 molecule,
   [0369] (ii) a structural jelly-roll region of the Anellovirus ORF1 molecule,
   [0370] (iii) a structural N22 domain of the Anellovirus ORF1 molecule, and/or
   [0371] (iv) a structural C-terminal domain of the Anellovirus ORF1 molecule;
   [0372] wherein the polypeptide further comprises (e.g., between the structural jelly-roll region and the structural N22 domain e.g., in a structural hypervariable region (HVR) as described herein) the amino acid sequence EQI, e.g., the amino acid sequence SPTQIEQIYT (SEQ ID NO: 2503); and
   [0373] wherein the Anellovirus ORF1 molecule of (i)-(iv) comprises at least one difference relative to a Ring 10 ORF1 protein.
[0374] 148. A polypeptide comprising (e.g., in an N to C-terminal direction) one or more of:
   [0375] (i) a structural arginine-rich region of an Anellovirus ORF1 molecule,
   [0376] (ii) a jelly-roll B—H strands subdomain of the Anellovirus ORF1 molecule,
   [0377] (iii) a P1-1 subdomain of the Anellovirus ORF1 molecule,
   [0378] (iv) a P1-2 subdomain of the Anellovirus ORF1 molecule,
   [0379] (v) a jelly-roll I strand subdomain of the Anellovirus ORF1 molecule, and/or
   [0380] (vi) a structural C-terminal domain of the Anellovirus ORF1 molecule;
   [0381] wherein the polypeptide further comprises (e.g., between the P1-1 subdomain and the P1-2 subdomain domain) the amino acid sequence EQI, e.g., the amino acid sequence SPTQIEQIYT (SEQ ID NO: 2503) (e.g., in a P2 domain as described herein); and
   [0382] wherein the Anellovirus ORF1 molecule of (i)-(vi) comprises at least one difference relative to a Ring 10 ORF1 protein.
[0383] 149. A polypeptide comprising a structural hypervariable region (HVR) having at least 75%, 80%, 85%, 90%, 95%, 96%, 97%, 98%, or 99% sequence identity to the structural HVR sequence of a Ring 2 ORF1 protein;
   [0384] wherein the polypeptide comprises one or more (e.g., 1, 2, or all 3) amino acid substitutions relative to the sequence of the Ring 2 ORF1 protein, the substitutions selected from K357E, N358Q, and E359I.
[0385] 150. A polypeptide comprising a P2 domain having at least 75%, 80%, 85%, 90%, 95%, 96%, 97%, 98%, or 99% sequence identity to the P2 domain sequence of a Ring 2 ORF1 protein;
   [0386] wherein the polypeptide comprises one or more (e.g., 1, 2, or all 3) amino acid substitutions relative to the sequence of the Ring 2 ORF1 protein, the substitutions selected from K357E, N358Q, and E359I.
[0387] 151. The polypeptide of embodiment 149 or 150, wherein the polypeptide comprises all three of the substitutions selected from K357E, N358Q, and E359I.
[0388] 152. A method of enriching a polypeptide of any of embodiments X1-X3b, the method comprising:
   [0389] (a) providing the polypeptide (e.g., wherein the polypeptide is comprised in an anelloVLP or a particle);
   [0390] (b) contacting the polypeptide with a binding moiety (e.g., an antibody molecule) that binds an epitope comprising the amino acid sequence EQI, and
   [0391] (c) enriching material bound by the binding moiety relative to material not bound by the binding moiety,
   [0392] thereby enriching the polypeptide.
[0393] 153. An anellovector comprising:
   [0394] (i) a proteinaceous exterior comprising a polypeptide of any of the preceding embodiments; and
   [0395] (ii) a genetic element enclosed by the proteinaceous exterior, wherein the genetic element comprises a sequence encoding an exogenous effector.
[0396] 154. An anellovector comprising:
   [0397] (i) a proteinaceous exterior comprising a plurality of Anellovirus ORF1 molecules, wherein the Anellovirus ORF1 molecule lacks part or all of a structural C-terminal domain (CTD); and
   [0398] (ii) a genetic element enclosed by the proteinaceous exterior, wherein the genetic element comprises a sequence encoding an exogenous effector.
[0399] 155. An anellovector comprising:
   [0400] (i) a proteinaceous exterior comprising a plurality of Anellovirus ORF1 molecules, wherein the Anellovirus ORF1 molecule lacks part or all of a structural arginine-rich region; and
   [0401] (ii) a genetic element enclosed by the proteinaceous exterior, wherein the genetic element comprises a sequence encoding an exogenous effector.
[0402] 156. A composition comprising a plurality of the anellovectors of any of embodiments 153-155.
[0403] 157. A particle comprising:
   [0404] a proteinaceous exterior comprising a plurality of Anellovirus ORF1 molecules, wherein the Anellovirus ORF1 molecule lacks part or all of a structural C-terminal domain (CTD);
   [0405] wherein the particle:
      [0406] (i) does not comprise (e.g., does not enclose) a polynucleotide (e.g., as determined using a nuclease protection assay as described herein),
      [0407] (ii) does not comprise (e.g., does not enclose) a polynucleotide of greater than 1000, 500, 200, or 100 nucleotides in length, or
      [0408] (iii) comprises less than about 1, 2, 3, 4, 5, 6, 7, 8, 9, 10, 15, 20, 25, 30, 40, 50, 60, 70, 80, 90, 100, 150, 200, 250, 300, 400, 500, 600, 700, 800, 900, or 1000 nucleotides.
[0409] 158. A particle comprising:
   [0410] a proteinaceous exterior comprising a plurality of Anellovirus ORF1 molecules, wherein the Anellovirus ORF1 molecule lacks part or all of a structural arginine-rich region;
   [0411] wherein the particle:
      [0412] (i) does not comprise (e.g., does not enclose) a polynucleotide (e.g., as determined using a nuclease protection assay as described herein),
      [0413] (ii) does not comprise (e.g., does not enclose) a polynucleotide of greater than 1000, 500, 200, or 100 nucleotides in length, or
      [0414] (iii) comprises less than about 1, 2, 3, 4, 5, 6, 7, 8, 9, 10, 15, 20, 25, 30, 40, 50, 60, 70, 80, 90, 100, 150, 200, 250, 300, 400, 500, 600, 700, 800, 900, or 1000 nucleotides.
[0415] 159. A particle comprising:
   [0416] a proteinaceous exterior comprising a plurality of Anellovirus ORF1 molecules, wherein the Anellovirus ORF1 molecule comprises a polypeptide of any of the preceding embodiments;
   [0417] wherein the particle:
      [0418] (i) does not comprise (e.g., does not enclose) a polynucleotide (e.g., as determined using a nuclease protection assay as described herein),
      [0419] (ii) does not comprise (e.g., does not enclose) a polynucleotide of greater than 1000, 500, 200, or 100 nucleotides in length, or
      [0420] (iii) comprises less than about 1, 2, 3, 4, 5, 6, 7, 8, 9, 10, 15, 20, 25, 30, 40, 50, 60, 70, 80, 90, 100, 150, 200, 250, 300, 400, 500, 600, 700, 800, 900, or 1000 nucleotides.
[0421] 160. The particle of any of embodiments 157-159, wherein the proteinaceous exterior comprises about 40-80 (e.g., about 60), 100-140 (e.g., about 120), or 160-200 (e.g., about 180) copies of the Anellovirus ORF1 molecules.
[0422] 161. The particle of any of embodiments 157-160, wherein the particle further comprises an exogenous effector or a nucleic acid sequence encoding an exogenous effector.
[0423] 162. A composition comprising a plurality of the particles of any of embodiments 157-161.
[0424] 163. A nucleic acid molecule encoding a polypeptide of any of the preceding embodiments.
[0425] 164. A method of delivering an exogenous effector to a cell, the method comprising contacting a cell with an anellovector or particle of any of the preceding embodiments, or a particle (e.g., an anellovector) comprising a polypeptide of any of the preceding embodiments, thereby delivering the exogenous effector to the cell.
[0426] 165. A method of delivering an exogenous effector to a subject, the method comprising administering to the subject an anellovector or particle of any of the preceding embodiments, or a particle (e.g., an anellovector) comprising a polypeptide of any of the preceding embodiments, thereby delivering the exogenous effector to the subject.
[0427] 166. A method of treating or preventing a disease or disorder in a subject, the method comprising administering to a subject in need thereof an anellovector or particle of any of the preceding embodiments, or a particle (e.g., an anellovector) comprising a polypeptide of any of the preceding embodiments, thereby treating or preventing the disease or disorder in the subject.
[0428] 167. A method of making an anellovector, the method comprising:
   [0429] (a) providing a host cell comprising:
      [0430] (i) a plurality of Anellovirus ORF1 molecules, wherein the Anellovirus ORF1 molecule comprises a polypeptide of any of the preceding embodiments, and
      [0431] (ii) a genetic element, wherein the genetic element comprises a sequence encoding an exogenous effector; and
   [0432] (b) maintaining the host cell under conditions that allow for production of a proteinaceous exterior that comprises the plurality of Anellovirus ORF1 molecules, wherein the proteinaceous exterior encloses the genetic element,
   [0433] thereby producing one or more of the anellovectors from the host cell.
[0434] 168. A method of making an anellovector, the method comprising:
   [0435] (a) providing a host cell comprising:
      [0436] (i) a plurality of Anellovirus ORF1 molecules, wherein the Anellovirus ORF1 molecule lacks part or all of a structural C-terminal domain (CTD), and
      [0437] (ii) a genetic element, wherein the genetic element comprises a sequence encoding an exogenous effector; and
   [0438] (b) maintaining the host cell under conditions that allow for production of a proteinaceous exterior that comprises the plurality of Anellovirus ORF1 molecules, wherein the proteinaceous exterior encloses the genetic element;
   [0439] thereby producing one or more of the anellovectors from the host cell.
[0440] 169. A method of making an anellovector, the method comprising:
   [0441] (a) providing a host cell comprising:
      [0442] (i) a plurality of Anellovirus ORF1 molecules, wherein the Anellovirus ORF1 molecule lacks part or all of a structural arginine-rich region, and
      [0443] (ii) a genetic element, wherein the genetic element comprises a sequence encoding an exogenous effector; and
   [0444] (b) maintaining the host cell under conditions that allow for production of a proteinaceous exterior that comprises the plurality of Anellovirus ORF1 molecules, wherein the proteinaceous exterior encloses the genetic element;
   [0445] thereby producing one or more of the anellovectors from the host cell.
[0446] 170. The method of any of embodiments 167-169, wherein providing the host cell comprising the plurality of Anellovirus ORF1 molecules comprises maintaining the host cell under conditions that allow for expression of the Anellovirus ORF1 molecules.
[0447] 171. A method of making an anellovector, the method comprising:
   [0448] (a) providing a mixture comprising a plurality of Anellovirus ORF1 molecules, wherein the Anellovirus ORF1 molecule comprises a polypeptide of any of the preceding embodiments; optionally subjecting the mixture to denaturing conditions (e.g., providing a denaturant as part of the mixture or contacting the mixture with a denaturant), wherein at least 75%, 80%, 90%, 95%, 96%, 97%, 98%, 99%, or 100% of the plurality of ORF1 molecules are not comprised in a particle comprising about 40-80 (e.g., about 60) copies of an ORF1 molecule;
   [0449] (b) subjecting the mixture to non-denaturing conditions (e.g., reducing the concentration of the denaturant to a level) suitable for in vitro assembly of the Anellovirus ORF1 molecules (e.g., by dialysis); and
   [0450] (c) incubating the Anellovirus ORF1 molecules with a plurality of genetic elements, under conditions suitable for assembly of the Anellovirus ORF1 molecules into one or more anellovectors each enclosing one or more of the genetic elements.
[0451] 172. A method of making an anellovector, the method comprising:
   [0452] (a) providing a mixture comprising a plurality of Anellovirus ORF1 molecules, wherein the Anellovirus ORF1 molecule lacks part or all of a structural C-terminal domain (CTD); optionally subjecting the mixture to denaturing conditions (e.g., providing a denaturant as part of the mixture or contacting the mixture with a denaturant), wherein at least 75%, 80%, 90%, 95%, 96%, 97%, 98%, 99%, or 100% of the plurality of ORF1 molecules are not comprised in a particle comprising about 40-80 (e.g., about 60) copies of an ORF1 molecule;
   [0453] (b) subjecting the mixture to non-denaturing conditions (e.g., reducing the concentration of the denaturant to a level) suitable for in vitro assembly of the Anellovirus ORF1 molecules (e.g., by dialysis); and
   [0454] (c) incubating the Anellovirus ORF1 molecules with a plurality of genetic elements, under conditions suitable for assembly of the Anellovirus ORF1 molecules into one or more anellovectors each enclosing one or more of the genetic elements.
[0455] 173. A method of making an anellovector, the method comprising:
   [0456] (a) providing a mixture comprising a plurality of Anellovirus ORF1 molecules, wherein the Anellovirus ORF1 molecule lacks part or all of a structural arginine-rich region; optionally subjecting the mixture to denaturing conditions (e.g., providing a denaturant as part of the mixture or contacting the mixture with a denaturant), wherein at least 75%, 80%, 90%, 95%, 96%, 97%, 98%, 99%, or 100% of the plurality of ORF1 molecules are not comprised in a particle comprising about 40-80 (e.g., about 60) copies of an ORF1 molecule;
   [0457] (b) subjecting the mixture to non-denaturing conditions (e.g., reducing the concentration of the denaturant to a level) suitable for in vitro assembly of the Anellovirus ORF1 molecules (e.g., by dialysis); and
   [0458] (c) incubating the Anellovirus ORF1 molecules with a plurality of genetic elements, under conditions suitable for assembly of the Anellovirus ORF1 molecules into one or more anellovectors each enclosing one or more of the genetic elements.
[0459] 174. A method of making an anelloVLP, the method comprising:
   [0460] (a) providing a mixture comprising a plurality of Anellovirus ORF1 molecules, wherein the Anellovirus ORF1 molecule comprises a polypeptide of any of the preceding embodiments, and wherein at least 75%, 80%, 90%, 95%, 96%, 97%, 98%, 99%, or 100% of the plurality of ORF1 molecules are not comprised in a particle comprising about 40-80 (e.g., about 60) copies of an ORF1 molecule;
   [0461] (b) subjecting the mixture to conditions suitable for in vitro assembly of the Anellovirus ORF1 molecules; and
   [0462] (c) incubating the Anellovirus ORF1 molecules with a plurality of effectors (e.g., exogenous effectors), under conditions suitable for assembly of the Anellovirus ORF1 molecules into one or more anelloVLPs each enclosing one or more of the effectors.
[0463] 175. A method of making an anelloVLP, the method comprising:
   [0464] (a) providing a mixture comprising a plurality of Anellovirus ORF1 molecules, wherein the Anellovirus ORF1 molecule lacks part or all of a structural C-terminal domain (CTD), and wherein at least 75%, 80%, 90%, 95%, 96%, 97%, 98%, 99%, or 100% of the plurality of ORF1 molecules are not comprised in a particle comprising about 40-80 (e.g., about 60) copies of an ORF1 molecule;
   [0465] (b) subjecting the mixture to conditions suitable for in vitro assembly of the Anellovirus ORF1 molecules; and
   [0466] (c) incubating the Anellovirus ORF1 molecules with a plurality of effectors (e.g., exogenous effectors), under conditions suitable for assembly of the Anellovirus ORF1 molecules into one or more anelloVLPs each enclosing one or more of the effectors.
[0467] 176. A method of making an anelloVLP, the method comprising:
   [0468] (a) providing a mixture comprising a plurality of Anellovirus ORF1 molecules, wherein the Anellovirus ORF1 molecule lacks part or all of a structural arginine-rich region, and wherein at least 75%, 80%, 90%, 95%, 96%, 97%, 98%, 99%, or 100% of the plurality of ORF1 molecules are not comprised in a particle comprising about 40-80 (e.g., about 60) copies of an ORF1 molecule;
   [0469] (b) subjecting the mixture to conditions suitable for in vitro assembly of the Anellovirus ORF1 molecules; and
   [0470] (c) incubating the Anellovirus ORF1 molecules with a plurality of effectors (e.g., exogenous effectors), under conditions suitable for assembly of the Anellovirus ORF1 molecules into one or more anelloVLPs each enclosing one or more of the effectors.
[0471] 177. The polypeptide, particle, nucleic acid molecule, or method of any of the preceding embodiments, wherein the polypeptide or Anellovirus ORF1 molecule comprises an exogenous surface moiety.
[0472] 178. The polypeptide, particle, nucleic acid molecule, or method of embodiment 177, wherein the exogenous surface moiety is fused to the N-terminus of the Anellovirus ORF1 molecule.
[0473] 179. The polypeptide, particle, nucleic acid molecule, or method of embodiment 177, wherein the exogenous surface moiety is fused to the C-terminus of the Anellovirus ORF1 molecule.
[0474] 180. The polypeptide, particle, nucleic acid molecule, or method of embodiment 177, wherein the exogenous surface moiety is inserted within the amino acid sequence of the Anellovirus ORF1 molecule.
[0475] 181. The polypeptide, particle, nucleic acid molecule, or method of any of embodiments 178-180, wherein the Anellovirus ORF1 molecule comprises a portion of a structural C-terminal domain (CTD) of an Anellovirus ORF1 molecule, which comprises a deletion of about 20-30, 30-40 (e.g., about 37), 40-50 (e.g., about 55), 50-60, 60-70, 70-80, 80-90, 90-100, 100-110, 110-120, 120-130 (e.g., about 129), 130-140 (e.g., about 131), 140-150 (e.g., about 148), or 150-160 (e.g., about 155) amino acids at the C-terminal end of the structural CTD, relative to a corresponding wild-type structural CTD of the Anellovirus ORF1 molecule.
[0476] 182. The polypeptide, particle, nucleic acid molecule, or method of any of embodiments 178-180, wherein the Anellovirus ORF1 molecule comprises a portion of a structural CTD of an Anellovirus ORF1 molecule, wherein the portion consists of the N-terminal most 1-5, 5-10 (e.g. about 7), 10-20, 30-40, 40-50, 50-60 (e.g. about 52), 60-70 (e.g., about 69), 70-80, 80-90 (e.g., about 88), 90-100 (e.g., about 93), or 100-110 amino acids of a corresponding wild-type structural CTD of an Anellovirus ORF1 molecule, or a sequence having at least 80%, 85%, 90%, 95%, 96%, 97%, 98%, or 99% identity thereto.
[0477] 183. The polypeptide, particle, nucleic acid molecule, or method of any of the preceding embodiments, wherein the polypeptide or Anellovirus ORF1 molecule comprises a detectable marker or effector (e.g., exogenous effector).
[0478] 184. The polypeptide, particle, nucleic acid molecule, or method of embodiment 183, wherein the detectable marker or effector is fused to the N-terminus of the Anellovirus ORF1 molecule.
[0479] 185. The polypeptide, particle, nucleic acid molecule, or method of embodiment 183, wherein the detectable marker or effector is fused to the C-terminus of the Anellovirus ORF1 molecule.
[0480] 186. The polypeptide, particle, nucleic acid molecule, or method of embodiment 183, wherein the detectable marker or effector is inserted within the amino acid sequence of the Anellovirus ORF1 molecule.
[0481] 187. The polypeptide, particle, nucleic acid molecule, or method of any one of embodiments 183-186, wherein the detectable marker comprises an epitope tag, e.g., a His tag or a FLAG tag.
[0482] 188. The polypeptide, particle, nucleic acid molecule, or method of any one of embodiments 183-187, wherein the detectable marker comprises a fluorescent protein (e.g., GFP).
[0483] 189. The polypeptide, particle, nucleic acid molecule, or method of any one of embodiments 183-188, wherein the polypeptide or Anellovirus ORF1 molecule comprises a protease recognition sequence (e.g., a 3C protease recognition sequence) between the detectable marker or effector and the remainder of the polypeptide or Anellovirus ORF1 molecule.
[0484] 190. The polypeptide, particle, nucleic acid molecule, or method of any one of embodiments 183-189, wherein the effector is a therapeutic effector (e.g., a therapeutic polypeptide or therapeutic nucleic acid molecule).
[0485] 191. The polypeptide, particle, nucleic acid molecule, or method of any of the preceding embodiments, wherein the polypeptide or Anellovirus ORF1 molecule comprises at its N-terminus a methionine residue corresponding to the N-terminal methionine residue of an Anellovirus structural arginine-rich region.
[0486] 192. The polypeptide, particle, nucleic acid molecule, or method of any of the preceding embodiments, wherein the Anellovirus ORF1 molecule is a Ring 2 ORF1 molecule (e.g., as described herein), or an ORF1 molecule having at least 75%, 80%, 90%, 95%, 96%, 97%, 98%, 99%, or 100% sequence identity thereto.
[0487] 193. The polypeptide, particle, nucleic acid molecule, or method of any of the preceding embodiments, wherein the Anellovirus ORF1 molecule is an ORF1 molecule of SEQ ID NO: 58, or an ORF1 molecule having at least 75%, 80%, 90%, 95%, 96%, 97%, 98%, 99%, or 100% sequence identity thereto.
[0488] 194. The polypeptide, particle, nucleic acid molecule, or method of any of the preceding embodiments, wherein the Anellovirus ORF1 molecule is a Ring 9 ORF1 molecule (e.g., as described herein), or an ORF1 molecule having at least 75%, 80%, 90%, 95%, 96%, 97%, 98%, 99%, or 100% sequence identity thereto.
[0489] 195. The polypeptide, particle, nucleic acid molecule, or method of any of the preceding embodiments, wherein the Anellovirus ORF1 molecule is an ORF1 molecule of SEQ ID NO: 1005, or an ORF1 molecule having at least 75%, 80%, 90%, 95%, 96%, 97%, 98%, 99%, or 100% sequence identity thereto.
[0490] 196. The polypeptide, particle, nucleic acid molecule, or method of any of the preceding embodiments, wherein the Anellovirus ORF1 molecule is a Ring 10 ORF1 molecule (e.g., as described herein), or an ORF1 molecule having at least 75%, 80%, 90%, 95%, 96%, 97%, 98%, 99%, or 100% sequence identity thereto.
[0491] 197. The polypeptide, particle, nucleic acid molecule, or method of any of the preceding embodiments, wherein the Anellovirus ORF1 molecule is an ORF1 molecule of SEQ ID NO: 1012, or an ORF1 molecule having at least 75%, 80%, 90%, 95%, 96%, 97%, 98%, 99%, or 100% sequence identity thereto.
[0492] 198. The polypeptide, particle, nucleic acid molecule, or method of any of the preceding embodiments, wherein the Anellovirus ORF1 molecule is a Ring 18 ORF1 molecule (e.g., as described herein), or an ORF1 molecule having at least 75%, 80%, 90%, 95%, 96%, 97%, 98%, 99%, or 100% sequence identity thereto.
[0493] 199. The polypeptide, particle, nucleic acid molecule, or method of any of the preceding embodiments, wherein the Anellovirus ORF1 molecule is an ORF1 molecule of SEQ ID NO: 1100, or an ORF1 molecule having at least 75%, 80%, 90%, 95%, 96%, 97%, 98%, 99%, or 100% sequence identity thereto.
[0494] 200. The polypeptide, particle, nucleic acid molecule, or method of any of the preceding embodiments, wherein the Anellovirus ORF1 molecule is a Ring 19 ORF1 molecule (e.g., as described herein), or an ORF1 molecule having at least 75%, 80%, 90%, 95%, 96%, 97%, 98%, 99%, or 100% sequence identity thereto.
[0495] 201. The polypeptide, particle, nucleic acid molecule, or method of any of the preceding embodiments, wherein the Anellovirus ORF1 molecule is an ORF1 molecule of Table B1-11a, or an ORF1 molecule having at least 75%, 80%, 90%, 95%, 96%, 97%, 98%, 99%, or 100% sequence identity thereto.
[0496] 202. The polypeptide, particle, nucleic acid molecule, or method of any of the preceding embodiments, wherein the polypeptide or Anellovirus ORF1 molecule comprises an amino acid sequence as shown in any of Tables B1-1 to B4-5, or an amino acid sequence having at least 75%, 80%, 90%, 95%, 96%, 97%, 98%, 99%, or 100% sequence identity thereto.
[0497] 203. The polypeptide, particle, nucleic acid molecule, or method of any of the preceding embodiments, wherein the polypeptide or Anellovirus ORF1 molecule comprises an amino acid sequence as shown in any of Tables B1-1 to B4-5, or an amino acid sequence having at least 90% sequence identity thereto.
[0498] 204. The polypeptide, particle, nucleic acid molecule, or method of any of the preceding embodiments, wherein the polypeptide or Anellovirus ORF1 molecule comprises an amino acid sequence as shown in any of Tables B1-1 to B4-5, or an amino acid sequence having at least 95% sequence identity thereto.
[0499] 205. The polypeptide, particle, nucleic acid molecule, or method of any of the preceding embodiments, wherein the polypeptide or Anellovirus ORF1 molecule comprises an amino acid sequence as shown in any of Tables B1-1 to B4-5, or an amino acid sequence having at least 99% sequence identity thereto.
[0500] 206. The polypeptide, particle, nucleic acid molecule, or method of any of the preceding embodiments, wherein the polypeptide or Anellovirus ORF1 molecule comprises the structural arginine-rich region sequence of Ring 2, Ring 9, Ring 10, Ring 18, or Ring 19, or an amino acid sequence having at least 75%, 80%, 90%, 95%, 96%, 97%, 98%, or 99% sequence identity thereto.
[0501] 207. The polypeptide, particle, nucleic acid molecule, or method of any of the preceding embodiments, wherein the polypeptide or Anellovirus ORF1 molecule comprises the structural jelly-roll domain sequence of Ring 2, Ring 9, Ring 10, Ring 18, or Ring 19, or an amino acid sequence having at least 75%, 80%, 90%, 95%, 96%, 97%, 98%, or 99% sequence identity thereto.
[0502] 208. The polypeptide, particle, nucleic acid molecule, or method of any of the preceding embodiments, wherein the polypeptide or Anellovirus ORF1 molecule comprises the structural hypervariable domain sequence of Ring 2, Ring 9, Ring 10, Ring 18, or Ring 19, or an amino acid sequence having at least 75%, 80%, 90%, 95%, 96%, 97%, 98%, or 99% sequence identity thereto.
[0503] 209. The polypeptide, particle, nucleic acid molecule, or method of any of the preceding embodiments, wherein the polypeptide or Anellovirus ORF1 molecule comprises the structural N22 domain sequence of Ring 2, Ring 9, Ring 10, Ring 18, or Ring 19, or an amino acid sequence having at least 75%, 80%, 90%, 95%, 96%, 97%, 98%, or 99% sequence identity thereto.
[0504] 210. The polypeptide, particle, nucleic acid molecule, or method of any of the preceding embodiments, wherein the polypeptide or Anellovirus ORF1 molecule comprises the structural C-terminal domain sequence of Ring 2, Ring 9, Ring 10, Ring 18, or Ring 19, or an amino acid sequence having at least 75%, 80%, 90%, 95%, 96%, 97%, 98%, or 99% sequence identity thereto.
[0505] 211. The polypeptide, particle, nucleic acid molecule, or method of any of the preceding embodiments, wherein the polypeptide or Anellovirus ORF1 molecule does not comprise the structural arginine-rich region sequence of Ring 2, Ring 9, Ring 10, Ring 18, or Ring 19, or an amino acid sequence having at least 75%, 80%, 90%, 95%, 96%, 97%, 98%, or 99% sequence identity thereto.
[0506] 212. The polypeptide, particle, nucleic acid molecule, or method of any of the preceding embodiments, wherein the polypeptide or Anellovirus ORF1 molecule does not comprise the structural jelly-roll domain sequence of Ring 2, Ring 9, Ring 10, Ring 18, or Ring 19, or an amino acid sequence having at least 75%, 80%, 90%, 95%, 96%, 97%, 98%, or 99% sequence identity thereto.
[0507] 213. The polypeptide, particle, nucleic acid molecule, or method of any of the preceding embodiments, wherein the polypeptide or Anellovirus ORF1 molecule does not comprise the structural hypervariable domain sequence of Ring 2, Ring 9, Ring 10, Ring 18, or Ring 19, or an amino acid sequence having at least 75%, 80%, 90%, 95%, 96%, 97%, 98%, or 99% sequence identity thereto.
[0508] 214. The polypeptide, particle, nucleic acid molecule, or method of any of the preceding embodiments, wherein the polypeptide or Anellovirus ORF1 molecule does not comprise the structural N22 domain sequence of Ring 2, Ring 9, Ring 10, Ring 18, or Ring 19, or an amino acid sequence having at least 75%, 80%, 90%, 95%, 96%, 97%, 98%, or 99% sequence identity thereto.
[0509] 215. The polypeptide, particle, nucleic acid molecule, or method of any of the preceding embodiments, wherein the polypeptide or Anellovirus ORF1 molecule does not comprise the structural C-terminal domain sequence of Ring 2, Ring 9, Ring 10, Ring 18, or Ring 19, or an amino acid sequence having at least 75%, 80%, 90%, 95%, 96%, 97%, 98%, or 99% sequence identity thereto.
[0510] 216. The polypeptide, particle, nucleic acid molecule, or method of any of the preceding embodiments, wherein the polypeptide or Anellovirus ORF1 molecule comprises the structural arginine-rich region sequence of Ring 2, Ring 9, Ring 10, Ring 18, or Ring 19, or an amino acid sequence having at least 75%, 80%, 90%, 95%, 96%, 97%, 98%, or 99% sequence identity thereto.
[0511] 217. The polypeptide, particle, nucleic acid molecule, or method of any of the preceding embodiments, wherein the polypeptide or Anellovirus ORF1 molecule comprises beta strands B—H of the structural jelly-roll domain sequence of Ring 2, Ring 9, Ring 10, Ring 18, or Ring 19, or an amino acid sequence having at least 75%, 80%, 90%, 95%, 96%, 97%, 98%, or 99% sequence identity thereto.
[0512] 218. The polypeptide, particle, nucleic acid molecule, or method of any of the preceding embodiments, wherein the polypeptide or Anellovirus ORF1 molecule comprises the P1-1 domain sequence of Ring 2, Ring 9, Ring 10, Ring 18, or Ring 19, or an amino acid sequence having at least 75%, 80%, 90%, 95%, 96%, 97%, 98%, or 99% sequence identity thereto.
[0513] 219. The polypeptide, particle, nucleic acid molecule, or method of any of the preceding embodiments, wherein the polypeptide or Anellovirus ORF1 molecule comprises the P2 domain sequence of Ring 2, Ring 9, Ring 10, Ring 18, or Ring 19, or an amino acid sequence having at least 75%, 80%, 90%, 95%, 96%, 97%, 98%, or 99% sequence identity thereto.
[0514] 220. The polypeptide, particle, nucleic acid molecule, or method of any of the preceding embodiments, wherein the polypeptide or Anellovirus ORF1 molecule comprises the P1-2 domain sequence of Ring 2, Ring 9, Ring 10, Ring 18, or Ring 19, or an amino acid sequence having at least 75%, 80%, 90%, 95%, 96%, 97%, 98%, or 99% sequence identity thereto.
[0515] 221. The polypeptide, particle, nucleic acid molecule, or method of any of the preceding embodiments, wherein the polypeptide or Anellovirus ORF1 molecule comprises beta strand I of the structural jelly-roll domain sequence of Ring 2, Ring 9, Ring 10, Ring 18, or Ring 19, or an amino acid sequence having at least 75%, 80%, 90%, 95%, 96%, 97%, 98%, or 99% sequence identity thereto.
[0516] 222. The polypeptide, particle, nucleic acid molecule, or method of any of the preceding embodiments, wherein the polypeptide or Anellovirus ORF1 molecule comprises the structural C-terminal domain sequence of Ring 2, Ring 9, Ring 10, Ring 18, or Ring 19, or an amino acid sequence having at least 75%, 80%, 90%, 95%, 96%, 97%, 98%, or 99% sequence identity thereto.
[0517] 223. The polypeptide, particle, nucleic acid molecule, or method of any of the preceding embodiments, wherein the polypeptide or Anellovirus ORF1 molecule does not comprise the structural arginine-rich region sequence of Ring 2, Ring 9, Ring 10, Ring 18, or Ring 19, or an amino acid sequence having at least 75%, 80%, 90%, 95%, 96%, 97%, 98%, or 99% sequence identity thereto.
[0518] 224. The polypeptide, particle, nucleic acid molecule, or method of any of the preceding embodiments, wherein the polypeptide or Anellovirus ORF1 molecule does not comprise beta strands B—H of the structural jelly-roll domain sequence of Ring 2, Ring 9, Ring 10, Ring 18, or Ring 19, or an amino acid sequence having at least 75%, 80%, 90%, 95%, 96%, 97%, 98%, or 99% sequence identity thereto.
[0519] 225. The polypeptide, particle, nucleic acid molecule, or method of any of the preceding embodiments, wherein the polypeptide or Anellovirus ORF1 molecule does not comprise the P1-1 domain sequence of Ring 2, Ring 9, Ring 10, Ring 18, or Ring 19, or an amino acid sequence having at least 75%, 80%, 90%, 95%, 96%, 97%, 98%, or 99% sequence identity thereto.
[0520] 226. The polypeptide, particle, nucleic acid molecule, or method of any of the preceding embodiments, wherein the polypeptide or Anellovirus ORF1 molecule does not comprise the P2 domain sequence of Ring 2, Ring 9, Ring 10, Ring 18, or Ring 19, or an amino acid sequence having at least 75%, 80%, 90%, 95%, 96%, 97%, 98%, or 99% sequence identity thereto.
[0521] 227. The polypeptide, particle, nucleic acid molecule, or method of any of the preceding embodiments, wherein the polypeptide or Anellovirus ORF1 molecule does not comprise the P1-2 domain sequence of Ring 2, Ring 9, Ring 10, Ring 18, or Ring 19, or an amino acid sequence having at least 75%, 80%, 90%, 95%, 96%, 97%, 98%, or 99% sequence identity thereto.
[0522] 228. The polypeptide, particle, nucleic acid molecule, or method of any of the preceding embodiments, wherein the polypeptide or Anellovirus ORF1 molecule does not comprise beta strand I of the structural jelly-roll domain sequence of Ring 2, Ring 9, Ring 10, Ring 18, or Ring 19, or an amino acid sequence having at least 75%, 80%, 90%, 95%, 96%, 97%, 98%, or 99% sequence identity thereto.
[0523] 229. The polypeptide, particle, nucleic acid molecule, or method of any of the preceding embodiments, wherein the polypeptide or Anellovirus ORF1 molecule does not comprise the structural C-terminal domain sequence of Ring 2, Ring 9, Ring 10, Ring 18, or Ring 19, or an amino acid sequence having at least 75%, 80%, 90%, 95%, 96%, 97%, 98%, or 99% sequence identity thereto.
[0524] 230. The polypeptide, particle, nucleic acid molecule, or method of any of the preceding embodiments, wherein the polypeptide or Anellovirus ORF1 molecule comprises one or more (e.g., 1, 2, or all 3) amino acid substitutions relative to the sequence of the Ring 2 ORF1 protein, the substitutions selected from K357E, N358Q, and E359I.
[0525] 231. The polypeptide, particle, nucleic acid molecule, or method of any of the preceding embodiments, wherein the polypeptide or Anellovirus ORF1 molecule comprises the amino acid sequence SPTQIEQIYT (SEQ ID NO: 2503) (e.g., in a structural HVR domain as described herein).
[0526] 232. The polypeptide, particle, nucleic acid molecule, or method of any of the preceding embodiments, wherein the polypeptide or Anellovirus ORF1 molecule comprises the amino acid sequence SPTQIEQIYT (SEQ ID NO: 2503) (e.g., in a P2 domain as described herein).
[0527] 233. An anellovector comprising:
[0528] (i) a proteinaceous exterior comprising an Anellovirus ORF1 protein as listed in Table A32, or a polypeptide comprising an amino acid sequence having at least about 70%, 75%, 80%, 85%, 90%, 95%, 96%, 97%, 98%, or 99% sequence identity thereto, and
[0529] (ii) a genetic element enclosed by the proteinaceous exterior, wherein the genetic element comprises a promoter element operably linked to a nucleic acid sequence (e.g., a DNA sequence) encoding an exogenous effector.
[0530] 234. An anellovector comprising:
[0531] (i) a proteinaceous exterior comprising an Anellovirus ORF1 protein as listed in Table A32, or a polypeptide comprising an amino acid sequence having at least about 70%, 75%, 80%, 85%, 90%, 95%, 96%, 97%, 98%, or 99% sequence identity thereto, and
[0532] (ii) a genetic element enclosed by the proteinaceous exterior, wherein the genetic element comprises a promoter element operably linked to a nucleic acid sequence (e.g., a DNA sequence) encoding an effector (e.g., an exogenous effector or an endogenous effector);
[0533] wherein the proteinaceous exterior and/or the genetic element comprises at least one difference (e.g., a mutation, chemical modification, or epigenetic alteration) relative to a wild-type Anellovirus ORF1 protein and/or wild-type Anellovirus genome, respectively (e.g., as described herein), e.g., an insertion, substitution, chemical or enzymatic modification, and/or deletion, e.g., a deletion of a domain (e.g., one or more of a structural arginine-rich region, structural jelly-roll domain, structural HVR, structural N22, structural CTD, P1 domain, or P2 domain, e.g., as described herein) or genomic region (e.g., one or more of a TATA box, cap site, transcriptional start site, 5′ UTR, open reading frame (ORF), poly(A) signal, or GC-rich region, e.g., as described herein).
[0534] 235. An anellovector comprising:
[0535] (i) a proteinaceous exterior comprising a polypeptide encoded by an Anellovirus ORF1 nucleic acid sequence as listed in Table N24, or a polypeptide encoded by a nucleic acid sequence having at least about 70%, 75%, 80%, 85%, 90%, 95%, 96%, 97%, 98%, or 99% sequence identity to the Anellovirus ORF1 nucleic acid sequence, and
[0536] (ii) a genetic element enclosed by the proteinaceous exterior, wherein the genetic element comprises a promoter element operably linked to a nucleic acid sequence (e.g., a DNA sequence) encoding an exogenous effector.
[0537] 236. An anellovector comprising:
[0538] (i) a proteinaceous exterior comprising a polypeptide encoded by an Anellovirus ORF1 nucleic acid sequence as listed in Table N24, or a polypeptide encoded by a nucleic acid sequence having at least about 70%, 75%, 80%, 85%, 90%, 95%, 96%, 97%, 98%, or 99% sequence identity to the Anellovirus ORF1 nucleic acid sequence, and
[0539] (ii) a genetic element enclosed by the proteinaceous exterior, wherein the genetic element comprises a promoter element operably linked to a nucleic acid sequence (e.g., a DNA sequence) encoding an effector (e.g., an exogenous effector or an endogenous effector);
[0540] wherein the proteinaceous exterior and/or the genetic element comprises at least one difference (e.g., a mutation, chemical modification, or epigenetic alteration) relative to a wild-type Anellovirus ORF1 protein and/or wild-type Anellovirus genome, respectively (e.g., as described herein), e.g., an insertion, substitution, chemical or enzymatic modification, and/or deletion, e.g., a deletion of a domain (e.g., one or more of a structural arginine-rich region, structural jelly-roll domain, structural HVR, structural N22, structural CTD, P1 domain, or P2 domain, e.g., as described herein) or genomic region (e.g., one or more of a TATA box, cap site, transcriptional start site, 5′ UTR, open reading frame (ORF), poly(A) signal, or GC-rich region, e.g., as described herein).
[0541] 237. An anellovector comprising:
[0542] (i) a proteinaceous exterior (e.g., comprising an Anellovirus ORF1 molecule, e.g., as described herein, or a polypeptide comprising an amino acid sequence having at least about 70%, 75%, 80%, 85%, 90%, 95%, 96%, 97%, 98%, or 99% sequence identity thereto), and
[0543] (ii) a genetic element enclosed by the proteinaceous exterior, wherein the genetic element comprises: (a) a 5′ UTR conserved domain as listed in Table N24, or a nucleic acid sequence having at least 70%, 75%, 80%, 85%, 90%, 95%, 96%, 97%, 98%, 99%, or 100% sequence identity thereto, and (b) a promoter element operably linked to a nucleic acid sequence (e.g., a DNA sequence) encoding an exogenous effector.
[0544] 238. An anellovector comprising:
[0545] (i) a proteinaceous exterior (e.g., comprising an Anellovirus ORF1 molecule, e.g., as described herein, or a polypeptide comprising an amino acid sequence having at least about 70%, 75%, 80%, 85%, 90%, 95%, 96%, 97%, 98%, or 99% sequence identity thereto), and
[0546] (ii) a genetic element enclosed by the proteinaceous exterior, wherein the genetic element comprises: (a) a 5′ UTR conserved domain as listed in Table N24, or a nucleic acid sequence having at least 70%, 75%, 80%, 85%, 90%, 95%, 96%, 97%, 98%, 99%, or 100% sequence identity thereto, and (b) a promoter element operably linked to a nucleic acid sequence (e.g., a DNA sequence) encoding an effector (e.g., an exogenous effector or an endogenous effector);
[0547] wherein the proteinaceous exterior and/or the genetic element comprises at least one difference (e.g., a mutation, chemical modification, or epigenetic alteration) relative to a wild-type Anellovirus ORF1 protein and/or wild-type Anellovirus genome, respectively (e.g., as described herein), e.g., an insertion, substitution, chemical or enzymatic modification, and/or deletion, e.g., a deletion of a domain (e.g., one or more of a structural arginine-rich region, structural jelly-roll domain, structural HVR, structural N22, structural CTD, P1 domain, or P2 domain, e.g., as described herein) or genomic region (e.g., one or more of a TATA box, cap site, transcriptional start site, 5′ UTR, open reading frame (ORF), poly(A) signal, or GC-rich region, e.g., as described herein).
[0548] 239. An anellovector comprising:
[0549] (i) a proteinaceous exterior (e.g., comprising an Anellovirus ORF1 molecule, e.g., as described herein, or a polypeptide comprising an amino acid sequence having at least about 70%, 75%, 80%, 85%, 90%, 95%, 96%, 97%, 98%, or 99% sequence identity thereto), and
[0550] (ii) a genetic element enclosed by the proteinaceous exterior, wherein the genetic element comprises a promoter element operably linked to a nucleic acid sequence (e.g., a DNA sequence) encoding an exogenous effector, and wherein the genetic element has at least about 70%, 75%, 80%, 85%, 90%, 95%, 96%, 97%, 98%, 99%, or 100% sequence identity to an Anellovirus genome sequence as listed in Table N24.
[0551] 240. An anellovector comprising:
[0552] (i) a proteinaceous exterior (e.g., comprising an Anellovirus ORF1 molecule, e.g., as described herein, or a polypeptide comprising an amino acid sequence having at least about 70%, 75%, 80%, 85%, 90%, 95%, 96%, 97%, 98%, or 99% sequence identity thereto), and
[0553] (ii) a genetic element enclosed by the proteinaceous exterior, wherein the genetic element comprises a promoter element operably linked to a nucleic acid sequence (e.g., a DNA sequence) encoding an effector (e.g., an exogenous effector or an endogenous effector), and wherein the genetic element has at least about 70%, 75%, 80%, 85%, 90%, 95%, 96%, 97%, 98%, 99%, or 100% sequence identity to an Anellovirus genome sequence as listed in Table N24;
[0554] wherein the proteinaceous exterior and/or the genetic element comprises at least one difference (e.g., a mutation, chemical modification, or epigenetic alteration) relative to a wild-type Anellovirus ORF1 protein and/or wild-type Anellovirus genome, respectively (e.g., as described herein), e.g., an insertion, substitution, chemical or enzymatic modification, and/or deletion, e.g., a deletion of a domain (e.g., one or more of a structural arginine-rich region, structural jelly-roll domain, structural HVR, structural N22, or structural CTD, e.g., as described herein) or genomic region (e.g., one or more of a TATA box, cap site, transcriptional start site, 5′ UTR, open reading frame (ORF), poly(A) signal, or GC-rich region, e.g., as described herein).
[0555] 241. An isolated ORF1 molecule comprising the amino acid sequence of an ORF1 as listed in Table A32, or an amino acid sequence having at least about 70%, 75%, 80%, 85%, 90%, 95%, 96%, 97%, 98%, 99%, or 100% sequence identity thereto;
[0556] wherein the ORF1 molecule comprises at least one difference (e.g., a mutation, chemical modification, or epigenetic alteration) relative to a wild-type ORF1 protein (e.g., as described herein), e.g., an insertion, substitution, chemical or enzymatic modification, and/or deletion, e.g., a deletion of a domain (e.g., one or more of a structural arginine-rich region, structural jelly-roll domain, structural HVR, structural N22, structural CTD, P1 domain, or P2 domain, e.g., as described herein).
[0557] 242. An isolated ORF1 molecule comprising the amino acid sequence of the structural jelly-roll domain of an ORF1 as listed in Table A32, or an amino acid sequence having at least about 70%, 75%, 80%, 85%, 90%, 95%, 96%, 97%, 98%, 99%, or 100% sequence identity thereto;
[0558] wherein the ORF1 molecule comprises at least one difference (e.g., a mutation, chemical modification, or epigenetic alteration) relative to a wild-type ORF1 protein (e.g., as described herein), e.g., an insertion, substitution, chemical or enzymatic modification, and/or deletion, e.g., a deletion of a domain (e.g., one or more of a structural arginine-rich region, jelly-roll domain, structural HVR, structural N22, structural CTD, P1 domain, or P2 domain, e.g., as described herein).
[0559] 243. An isolated ORF2 molecule comprising the amino acid sequence of an ORF2 as listed in Table A32, or an amino acid sequence having at least about 70%, 75%, 80%, 85%, 90%, 95%, 96%, 97%, 98%, 99%, or 100% sequence identity thereto;
[0560] wherein the ORF2 molecule comprises at least one difference (e.g., a mutation, chemical modification, or epigenetic alteration) relative to a wild-type ORF2 protein (e.g., as described herein), e.g., an insertion, substitution, chemical or enzymatic modification, and/or deletion, e.g., a deletion of a domain.
[0561] 244. An isolated nucleic acid molecule (e.g., a genetic element construct or a genetic element) comprising the nucleic acid sequence of a 5′ UTR conserved domain as listed in Table N24, or a nucleic acid sequence having at least 70%, 75%, 80%, 85%, 90%, 95%, 96%, 97%, 98%, or 99% sequence identity thereto.
[0562] 245. An isolated nucleic acid molecule (e.g., a genetic element construct or a construct for providing an ORF1 molecule in trans, e.g., as described herein) comprising the nucleic acid sequence of an ORF1 gene as listed in Table N24, or a nucleic acid sequence having at least 70%, 75%, 80%, 85%, 90%, 95%, 96%, 97%, 98%, or 99% sequence identity thereto.
[0563] 246. An isolated nucleic acid molecule (e.g., a genetic element construct or a construct for providing an ORF2 molecule in trans, e.g., as described herein) comprising the nucleic acid sequence of an ORF2 gene as listed in Table N24, or a nucleic acid sequence having at least 70%, 75%, 80%, 85%, 90%, 95%, 96%, 97%, 98%, or 99% sequence identity thereto.
[0564] 247. An isolated nucleic acid molecule (e.g., a genetic element construct, a genetic element, or a construct for providing an ORF1 or ORF2 molecule in trans, e.g., as described herein) comprising an Anellovirus genome sequence as listed in Table N24, or a nucleic acid sequence having at least 50%, 60%, 70%, 75%, 80%, 85%, 90%, 95%, 96%, 97%, 98%, or 99% sequence identity thereto.
[0565] 248. A genetic element comprising:
[0566] (a) a 5′ UTR conserved domain as listed in Table N24, or a nucleic acid sequence having at least 70%, 75%, 80%, 85%, 90%, 95%, 96%, 97%, 98%, 99%, or 100% sequence identity thereto, and (b) a promoter element operably linked to a nucleic acid sequence (e.g., a DNA sequence) encoding an exogenous effector.
[0567] 249. A method of manufacturing an anellovector composition, the method comprising:
   [0568] (a) providing a cell, e.g., a host cell as described herein;
   [0569] (b) introducing a nucleic acid molecule encoding an ORF1 polypeptide as listed in Table A32 (or an amino acid sequence having at least about 70%, 75%, 80%, 85%, 90%, 95%, 96%, 97%, 98%, or 99% sequence identity thereto) into the cell;
   [0570] (c) introducing a genetic element construct into the cell (e.g., before, after, or simultaneously with (b)),
   [0571] (d) incubating the cell under conditions that allow the cell to produce anellovector; and
   [0572] (e) formulating the anellovectors, e.g., as a pharmaceutical composition suitable for administration to a subject,
[0573] thereby making the anellovector composition.
[0574] 250. A method of manufacturing an anellovector composition, the method comprising:
   [0575] (a) providing a cell, e.g., a host cell as described herein;
   [0576] (b) introducing a nucleic acid molecule encoding an ORF1 polypeptide into the cell;
   [0577] (c) introducing a genetic element construct into the cell as listed in Table N24 (or a nucleic acid sequence having at least about 70%, 75%, 80%, 85%, 90%, 95%, 96%, 97%, 98%, or 99% sequence identity thereto) (e.g., before, after, or simultaneously with (b)),
   [0578] (d) incubating the cell under conditions that allow the cell to produce anellovector; and
   [0579] (e) formulating the anellovectors, e.g., as a pharmaceutical composition suitable for administration to a subject,
[0580] thereby making the anellovector composition.
[0581] 251. A method of making an anellovector, e.g., a synthetic anellovector, comprising:
[0582] (a) providing a host cell comprising:
   [0583] (i) a nucleic acid molecule, e.g., a first nucleic acid molecule, comprising the nucleic acid sequence of a Anellovirus genome as listed in Table N24 (or a nucleic acid sequence having at least 70%, 75%, 80%, 85%, 90%, 95%, 96%, 97%, 98%, or 99% sequence identity thereto), and
   [0584] (ii) a nucleic acid molecule, e.g., a second nucleic acid molecule, encoding one or more of an amino acid sequence chosen from ORF1, ORF2, ORF2/2, ORF2/3, ORF1/1, or ORF1/2, e.g., as listed in Table A1, or an amino acid sequence having at least 70% 75%, 80%, 85%, 90%, 95%, 96%, 97%, 98%, or 99% sequence identity thereto; and
[0585] (b) culturing the host cell under conditions suitable to make the anellovector.
[0586] 252. A method of delivering an effector to an eye of a subject, the method comprising administering to the eye of the subject an anellovector of any of embodiments 233-240.
[0587] 253. A method of modulating a biological function in an eye of a subject, the method comprising administering the anellovector of any of embodiments 233-240 to the subject.
[0588] 254. A method of treating an eye disease or disorder in a subject in need thereof, the method comprising administering to the subject an anellovector of any of embodiments 233-240.
[0589] 255. An ORF1 molecule comprising an exogenous surface moiety, wherein the exogenous surface moiety is fused to, replaces, and/or is situated within an insertion point of an ORF1 domain (e.g., within an HVR or P2).
[0590] 256. An ORF1 molecule comprising an exogenous surface moiety, wherein the exogenous surface moiety is fused to, replaces, and/or is situated at an insertion point between residues corresponding to positions 284-285 of Ring 10 ORF1, e.g., in an ORF1 domain (e.g., within the HVR or P2 domain).
[0591] 257. An ORF1 molecule comprising an exogenous surface moiety, wherein the exogenous surface moiety is fused to, replaces, and/or is situated at an insertion point between residues corresponding to positions 328-329 of Ring 10 ORF1, e.g., in an ORF1 domain (e.g., within the HVR or P2 domain).
[0592] 258. An ORF1 molecule comprising an exogenous surface moiety, wherein the exogenous surface moiety is fused to, replaces, and/or is situated at an insertion point between residues corresponding to positions 256-383 of Ring 10 ORF1, e.g., in an ORF1 domain (e.g., within the HVR or P2 domain).
[0593] 259. An ORF1 molecule comprising an exogenous surface moiety, wherein the exogenous surface moiety is fused to, replaces, and/or is situated at an insertion point between residues corresponding to positions 251-383 of Ring 10 ORF1, e.g., in an ORF1 domain (e.g., within the HVR or P2 domain).
[0594] 260. An ORF1 molecule comprising an exogenous surface moiety, wherein the exogenous surface moiety is fused to, replaces, and/or is situated at an insertion point between residues corresponding to positions 251-384 of Ring 10 ORF1, e.g., in an ORF1 domain (e.g., within the HVR or P2 domain).
[0595] 261. An ORF1 molecule comprising an exogenous surface moiety, wherein the exogenous surface moiety is attached to (e.g., conjugated to) the amino acid residue (e.g., a cysteine residue) corresponding to position 254, 263, 264, 265, 272, 273, 274, 276, 283, 284, 285, 287, 288, 290, 291, 308, 311, 312, 313, 314, 316, 317, 318, 319, 321, 324, 328, 329, 341, 343, 354, 358, 361, 362, 363, 364, 365, 368, 369, 371, 374, 376, 378, 380, or 381 of Ring 10 ORF1, e.g., in an ORF1 domain (e.g., within the HVR or P2 domain).
[0596] 262. The ORF1 molecule of any of embodiments 255-261, wherein the exogenous surface moiety forms a pentamer when the ORF1 molecule is complexed with four other ORF1 molecules (e.g., four other copies of the ORF1 molecule).
[0597] 263. The ORF1 molecule of any of embodiments 255-262, wherein the exogenous surface moiety forms a trimer when the ORF1 molecule is complexed with four other ORF1 molecules (e.g., four other copies of the ORF1 molecule).
[0598] 264. The ORF1 molecule of any of embodiments 255-263, wherein the exogenous surface moiety forms a dimer when the ORF1 molecule is complexed with four other ORF1 molecules (e.g., four other copies of the ORF1 molecule).
[0599] 265. A protein complex comprising five ORF1 molecules, wherein each of the ORF1 molecules comprises:
[0600] (i) an ORF1 domain, and
[0601] (ii) an exogenous surface moiety;
   wherein the exogenous surface moieties of the five ORF1 molecules forms a pentamer.
[0602] 266. The protein complex of embodiment 265, wherein each of the exogenous surface moieties is fused to, replaces, and/or is situated within an insertion point of an ORF1 domain (e.g., within an HVR or P2) of the corresponding ORF1 molecule.
[0603] 267. The protein complex of embodiment 265, wherein each of the exogenous surface moieties is fused to, replaces, and/or is situated within an insertion point between residues corresponding to positions 284-285 in an ORF1 domain (e.g., within the HVR or P2 domain) of Ring 10 ORF1.
[0604] 268. The protein complex of embodiment 265, wherein each of the exogenous surface moieties is fused to, replaces, and/or is situated within an insertion point between residues corresponding to positions 328-329 in an ORF1 domain (e.g., within the HVR or P2 domain) of Ring 10 ORF1.
[0605] 269. The protein complex of embodiment 265, wherein each of the exogenous surface moieties is fused to, replaces, and/or is situated within an insertion point between residues corresponding to positions 256-383 in an ORF1 domain (e.g., within the HVR or P2 domain) of Ring 10 ORF1.
[0606] 270. The protein complex of embodiment 265, wherein each of the exogenous surface moieties is fused to, replaces, and/or is situated within an insertion point between residues corresponding to positions 251-383 in an ORF1 domain (e.g., within the HVR or P2 domain) of Ring 10 ORF1.
[0607] 271. The protein complex of embodiment 265, wherein each of the exogenous surface moieties is fused to, replaces, and/or is situated within an insertion point between residues corresponding to positions 251-384 in an ORF1 domain (e.g., within the HVR or P2 domain) of Ring 10 ORF1.
[0608] 272. The protein complex of embodiment 265, wherein each of the exogenous surface moieties is attached to (e.g., conjugated to) the amino acid residue (e.g., a cysteine residue) corresponding to position 254, 263, 264, 265, 272, 273, 274, 276, 283, 284, 285, 287, 288, 290, 291, 308, 311, 312, 313, 314, 316, 317, 318, 319, 321, 324, 328, 329, 341, 343, 354, 358, 361, 362, 363, 364, 365, 368, 369, 371, 374, 376, 378, 380, or 381 of Ring 10 ORF1, e.g., in an ORF1 domain (e.g., within the HVR or P2 domain).
[0609] 273. The protein complex of any of embodiments 265-272, wherein the exogenous surface moieties of the ORF1 molecules have the same amino acid sequences.
[0610] 274. The protein complex of any of embodiments 265-273, wherein at least two (e.g., at least 2, 3, 4, or 5) of the exogenous surface moieties of the ORF1 molecules have different amino acid sequences.
[0611] 275. A protein complex comprising three ORF1 molecules, wherein each of the ORF1 molecules comprises:
[0612] (i) an ORF1 domain, and
[0613] (ii) an exogenous surface moiety;
   wherein the exogenous surface moieties of the three ORF1 molecules forms a trimer.
[0614] 276. The protein complex of embodiment 275, wherein each of the exogenous surface moieties is fused to, replaces, and/or is situated within an insertion point of an ORF1 domain (e.g., within an HVR or P2) of the corresponding ORF1 molecule.
[0615] 277. The protein complex of embodiment 275, wherein each of the exogenous surface moieties is fused to, replaces, and/or is situated within an insertion point between positions 284-285 in an ORF1 domain (e.g., within the HVR or P2 domain) of the corresponding ORF1 molecule.
[0616] 278. The protein complex of embodiment 275, wherein each of the exogenous surface moieties is fused to, replaces, and/or is situated within an insertion point between positions 328-329 in an ORF1 domain (e.g., within the HVR or P2 domain) of the corresponding ORF1 molecule.
[0617] 279. The protein complex of embodiment 275, wherein each of the exogenous surface moieties is fused to, replaces, and/or is situated within an insertion point between positions 256-383 in an ORF1 domain (e.g., within the HVR or P2 domain) of the corresponding ORF1 molecule.
[0618] 280. The protein complex of embodiment 275, wherein each of the exogenous surface moieties is fused to, replaces, and/or is situated within an insertion point between positions 251-383 in an ORF1 domain (e.g., within the HVR or P2 domain) of the corresponding ORF1 molecule.
[0619] 281. The protein complex of embodiment 275, wherein each of the exogenous surface moieties is fused to, replaces, and/or is situated within an insertion point between positions 251-384 in an ORF1 domain (e.g., within the HVR or P2 domain) of the corresponding ORF1 molecule.
[0620] 282. The protein complex of embodiment 275, wherein each of the exogenous surface moieties is attached to (e.g., conjugated to) the amino acid residue (e.g., a cysteine residue) at position 254, 263, 264, 265, 272, 273, 274, 276, 283, 284, 285, 287, 288, 290, 291, 308, 311, 312, 313, 314, 316, 317, 318, 319, 321, 324, 328, 329, 341, 343, 354, 358, 361, 362, 363, 364, 365, 368, 369, 371, 374, 376, 378, 380, or 381 of the corresponding ORF1 molecule, e.g., in an ORF1 domain (e.g., within the HVR or P2 domain).
[0621] 283. The protein complex of any of embodiments 275-282, wherein the exogenous surface moieties of the ORF1 molecules have the same amino acid sequences.
[0622] 284. The protein complex of any of embodiments 275-283, wherein at least two (e.g., at least 2 or 3) of the exogenous surface moieties of the ORF1 molecules have different amino acid sequences.
[0623] 285. A protein complex comprising two ORF1 molecules, wherein each of the ORF1 molecules comprises:
[0624] (i) an ORF1 domain, and
[0625] (ii) an exogenous surface moiety;
   wherein the exogenous surface moieties of the two ORF1 molecules forms a dimer.
[0626] 286. The protein complex of embodiment 285, wherein each of the exogenous surface moieties is fused to, replaces, and/or is situated within an insertion point of an ORF1 domain (e.g., within an HVR or P2) of the corresponding ORF1 molecule.
[0627] 287. The protein complex of embodiment 285, wherein each of the exogenous surface moieties is fused to, replaces, and/or is situated within an insertion point between residues corresponding to positions 284-285 in an ORF1 domain (e.g., within the HVR or P2 domain) of Ring 10 ORF1.
[0628] 288. The protein complex of embodiment 285, wherein each of the exogenous surface moieties is fused to, replaces, and/or is situated within an insertion point between residues corresponding to positions 328-329 in an ORF1 domain (e.g., within the HVR or P2 domain) of Ring 10 ORF1.
[0629] 289. The protein complex of embodiment 285, wherein each of the exogenous surface moieties is fused to, replaces, and/or is situated within an insertion point between residues corresponding to positions 256-383 in an ORF1 domain (e.g., within the HVR or P2 domain) of Ring 10 ORF1.
[0630] 290. The protein complex of embodiment 285, wherein each of the exogenous surface moieties is fused to, replaces, and/or is situated within an insertion point between residues corresponding to positions 251-383 in an ORF1 domain (e.g., within the HVR or P2 domain) of Ring 10 ORF1.
[0631] 291. The protein complex of embodiment 285, wherein each of the exogenous surface moieties is fused to, replaces, and/or is situated within an insertion point between residues corresponding to positions 251-384 in an ORF1 domain (e.g., within the HVR or P2 domain) of Ring 10 ORF1.
[0632] 292. The protein complex of embodiment 285, wherein each of the exogenous surface moieties is attached to (e.g., conjugated to) the amino acid residue (e.g., a cysteine residue) corresponding to position 254, 263, 264, 265, 272, 273, 274, 276, 283, 284, 285, 287, 288, 290, 291, 308, 311, 312, 313, 314, 316, 317, 318, 319, 321, 324, 328, 329, 341, 343, 354, 358, 361, 362, 363, 364, 365, 368, 369, 371, 374, 376, 378, 380, or 381 of Ring 10 ORF1, e.g., in an ORF1 domain (e.g., within the HVR or P2 domain).
[0633] 293. The protein complex of any of embodiments 285-292, wherein the exogenous surface moieties of the two ORF1 molecules have the same amino acid sequences.
[0634] 294. The protein complex of any of embodiments 285-293, wherein the exogenous surface moieties of the two ORF1 molecules have different amino acid sequences.
[0635] 295. The polypeptide, particle, nucleic acid molecule, method, or protein complex of any of the preceding embodiments, wherein the polypeptide or ORF1 molecule comprises one or more substitutions of a cysteine residues (e.g., one or more cysteine to alanine substitutions or one or more cysteine to serine substitutions).
[0636] 296. The polypeptide, particle, nucleic acid molecule, method, or protein complex of any of the preceding embodiments, wherein the polypeptide or ORF1 molecule comprises a cysteine to serine mutation at one or more (e.g., 1, 2, 3, 4, 5, 6, 7, or 8) residues corresponding to position 63, 70, 137, 269, 403, 460, 503, and/or 515 of a Ring 10 ORF1 protein (e.g., as described herein).
[0637] 297. The polypeptide, particle, nucleic acid molecule, method, or protein complex of any of the preceding embodiments, wherein the polypeptide or ORF1 molecule comprises a cysteine to alanine mutation at one or more (e.g., 1, 2, 3, 4, 5, 6, or 7) residues corresponding to position 63, 137, 269, 403, 460, 503, and/or 515 of a Ring 10 ORF1 protein (e.g., as described herein).
[0638] 298. The polypeptide, particle, nucleic acid molecule, method, or protein complex of any of the preceding embodiments, wherein the polypeptide or ORF1 molecule comprises a cysteine to serine mutation at the residue corresponding to position 70 of a Ring 10 ORF1 protein (e.g., as described herein).
[0639] 299. The polypeptide, particle, nucleic acid molecule, method, or protein complex of any of the preceding embodiments, wherein the polypeptide or ORF1 molecule comprises a substitution of an amino acid residue (e.g., a threonine, serine, asparagine, alanine, glutamine, or lysine residue) to cysteine.
[0640] 300. The polypeptide, particle, nucleic acid molecule, method, or protein complex of embodiment 299, wherein the polypeptide or ORF1 molecule comprises a threonine to cysteine substitution, e.g., at the position corresponding to position 365 of a Ring 10 ORF1 protein (e.g., as described herein).
[0641] 301. The polypeptide, particle, nucleic acid molecule, method, or protein complex of embodiment 299, wherein the polypeptide or ORF1 molecule comprises a serine to cysteine substitution, e.g., at the position corresponding to position 284 of a Ring 10 ORF1 protein (e.g., as described herein).
[0642] 302. The polypeptide, particle, nucleic acid molecule, method, or protein complex of embodiment 299, wherein the polypeptide or ORF1 molecule comprises an asparagine to cysteine substitution, e.g., at the position corresponding to position 290 of a Ring 10 ORF1 protein (e.g., as described herein).
[0643] 303. The polypeptide, particle, nucleic acid molecule, method, or protein complex of embodiment 299, wherein the polypeptide or ORF1 molecule comprises a lysine to cysteine substitution, e.g., at the position corresponding to position 317 of a Ring 10 ORF1 protein (e.g., as described herein).
[0644] 304. The polypeptide, particle, nucleic acid molecule, method, or protein complex of embodiment 299, wherein the polypeptide or ORF1 molecule comprises a lysine to cysteine substitution, e.g., at the position corresponding to position 324 of a Ring 10 ORF1 protein (e.g., as described herein).
[0645] 305. The polypeptide, particle, nucleic acid molecule, method, or protein complex of embodiment 299, wherein the polypeptide or ORF1 molecule comprises an alanine to cysteine substitution, e.g., at the position corresponding to position 362 of a Ring 10 ORF1 protein (e.g., as described herein).
[0646] 306. The polypeptide, particle, nucleic acid molecule, method, or protein complex of embodiment 299, wherein the polypeptide or ORF1 molecule comprises a serine to cysteine substitution, e.g., at the position corresponding to position 363 of a Ring 10 ORF1 protein (e.g., as described herein).
[0647] 307. The polypeptide, particle, nucleic acid molecule, method, or protein complex of embodiment 299, wherein the polypeptide or ORF1 molecule comprises an asparagine to cysteine substitution, e.g., at the position corresponding to position 369 of a Ring 10 ORF1 protein (e.g., as described herein).
[0648] 308. The polypeptide, particle, nucleic acid molecule, method, or protein complex of embodiment 299, wherein the polypeptide or ORF1 molecule comprises a lysine to cysteine substitution, e.g., at the position corresponding to position 371 of a Ring 10 ORF1 protein (e.g., as described herein).
[0649] 309. The polypeptide, particle, nucleic acid molecule, method, or protein complex of embodiment 299, wherein the polypeptide or ORF1 molecule comprises a glutamine to cysteine substitution, e.g., at the position corresponding to position 287 of a Ring 10 ORF1 protein (e.g., as described herein).
[0650] 310. The polypeptide, particle, nucleic acid molecule, method, or protein complex of embodiment 299, wherein the polypeptide or ORF1 molecule comprises one or more substitutions to cysteine at one or more positions corresponding to Y254, R263, N264, K265, L272, G273, T274, R276, H283, T285, N288, D291, Q308, D311, W312, T313, E314, D316, H318, N319, T321, T328, K329, T341, Q343, T354, Q358, T361, T364, Q368, D374, P376, P378, Y380, and/or 1381 of a Ring 10 ORF1 protein (e.g., as described herein).
[0651] 311. A particle comprising:
[0652] (a) a proteinaceous exterior comprising an ORF1 molecule; and
[0653] (b) a genetic element comprising a heterologous nucleic acid sequence encoding an exogenous effector;
[0654] wherein the genetic element is enclosed within the proteinaceous exterior; and
[0655] wherein the particle has one or more of the following characteristics:
   [0656] (i) the genetic element (e.g., a DNA genetic element) does not comprise an Anellovirus 5′ UTR or an origin of replication;
   [0657] (ii) the sequence encoding the exogenous effector takes up at least 90%, 95%, 96%, 97%, 98%, 99% or 100% of the genetic element (e.g., a DNA genetic element);
   [0658] (iii) the heterologous nucleic acid sequence takes up at least 90%, 95%, 96%, 97%, 98%, 99% or 100% of the genetic element (e.g., a DNA genetic element);
   [0659] (iv) the particle does not comprise a detectable amount of (e.g., any) polypeptides from a host cell, or comprises less than 5, 10, 15, 20, 25, 30, 40, or 50 copies of a polypeptide from a host cell;
   [0660] (v) the particle does not comprise a detectable amount of (e.g., any) nucleic acid molecules from a host cell, or comprises less than 2, 3, 4, or 5 copies of a nucleic acid molecule from a host cell;
   [0661] (vi) the particle comprises a denaturant in a concentration of less than about 0.01M, 0.1M, 0.2M, 0.3M, 0.4M, 0.5M, 0.6M, 0.7M, 0.8M, 0.9M, 1M, 1.1M, 1.2M, 1.3M, 1.5M, 1.5M, 1.6M, 1.7M, 1.8M, 1.9M, or 2M;
   [0662] (vii) does not substantially replicate when introduced into a cell (e.g., a human cell); and/or
   [0663] (viii) has a symmetrical morphology.
[0664] 312. The particle of embodiment 311, wherein the heterologous nucleic acid sequence is about 60-100, 100-200, 200-300, 300-400, 400-500, 500-600, 600-700, 700-800, 800-900, 900-1000, 1000-1500, or 1500-2000, 2000-3000, 3000-4000, or 4000-5000 nucleotides in length.
[0665] 313. A population of the particles of embodiment 311, wherein at least 75%, 80%, 90%, 95%, 96%, 97%, 98%, 99%, or 100% of the particles in the population comprise at least 50, 55, or 60 copies of an Anellovirus ORF1 molecule.
[0666] 314. A population of the particles of embodiment 311, wherein at least 90% of the particles in the population have a diameter of at least 30, 31, 32, 33, 34, or 35 nm.
[0667] 315. A population of the particles of embodiment 311, wherein at least 90%, 95%, 96%, 97%, 98%, 99%, or 100% of the particles have a symmetrical morphology.
[0668] 316. A population of the particles of embodiment 311, wherein the population does not comprise a detectable amount of polypeptides from a host cell, or comprises less than 1, 2, 3, 4, 5, 10, 15, 20, 25, 30, 40, or 50 copies per particle of a polypeptide from a host cell.
[0669] 317. A population of the particles of embodiment 311, wherein the population does not comprise a detectable amount of nucleic acid molecules from a host cell, or comprises less than 1, 2, 3, 4, 5, 10, 15, 20, 25, 30, 40, or 50 copies per particle of a nucleic acid molecule from a host cell.
[0670] 318. A population of the particles of embodiment 311, wherein the population comprises less than 10 ng of nucleic acids.
[0671] 319. A population of the particles of embodiment 311, wherein the population does not comprise a detectable amount of nucleic acid molecules from a host cell, or comprises less than 1, 2, 3, 4, 5, 10, 15, 20, 25, 30, 40, or 50 copies per particle of a nucleic acid molecule having a length of 200 bp or less from a host cell.
[0672] 320. A particle comprising:
[0673] a proteinaceous exterior comprising about 40-80 (e.g., about 60) copies of an ORF1 molecule; and
[0674] wherein the particle:
[0675] (i) does not comprise (e.g., does not enclose) a polynucleotide,
[0676] (ii) does not comprise (e.g., does not enclose) detectable levels of polynucleotides,
[0677] (iii) does not comprise (e.g., does not enclose) a polynucleotide of greater than 1000, 500, 200, or 100 nucleotides in length,
[0678] (iv) does not comprise (e.g., does not enclose) a polynucleotide comprising any contiguous nucleic acid sequences of at least 50, 100, 150, 200, 300, 400, 500, 600, 700, 800, 900, or 1000 nucleotides in length having least 75%, 80%, 85%, 90%, 95%, 96%, 97%, 98%, 99%, or 100% sequence identity to contiguous sequence in a wild-type Anellovirus genome (e.g., as described herein), and/or
[0679] (v) does not comprise a polynucleotide comprising an Anellovirus 5′ UTR or an origin of replication.
[0680] 321. The particle of embodiment 320, further comprising an exogenous effector.
[0681] 322. The particle of embodiment 321, wherein the exogenous effector is enclosed within the proteinaceous exterior.
[0682] 323. The particle of embodiment 320 or 321, wherein the exogenous effector is a polypeptide.
[0683] 324. The particle of any of embodiments 320-323, wherein the exogenous effector is a small molecule.
[0684] 325. A composition comprising a plurality of particles, the particles comprising a proteinaceous exterior comprising about 40-80 (e.g., about 60) copies of an ORF1 molecule;
[0685] wherein at least 50%, 60%, 70%, 75%, 80%, 85%, 90%, 95%, 96%, 97%, 98%, 99%, 99.5%, or 99.9% of the particles do not comprise (e.g., do not enclose):
   [0686] (i) a polynucleotide,
   [0687] (ii) a nucleic acid molecule of greater than 1000, 500, 200, or 100 nucleotides in length,
   [0688] (iii) a plurality of polynucleotides,
   [0689] (iv) a circular nucleic acid molecule,
   [0690] (v) a single-stranded nucleic acid molecule, and/or
   [0691] (vi) a genetic element (e.g., a genetic element of an anellovector), e.g., as described herein; or
[0692] wherein the composition comprises less than 10¹⁰-10¹⁴ (e.g., less than 10¹⁰-10¹¹, 10¹¹-10¹², 10¹²-10¹³, or 10¹³-10¹⁴) viral genome equivalents of nucleic acid molecules (e.g., genetic elements, e.g., of an anellovector as described herein) per kilogram of a subject to be administered the composition (e.g., as determined by qPCR or by measuring optical density).
[0693] 326. The composition of embodiment 325, further comprising a denaturant (e.g., urea), e.g., in concentration of less than about 0.01M, 0.1M, 0.2M, 0.3M, 0.4M, 0.5M, 0.6M, 0.7M, 0.8M, 0.9M, 1M, 1.1M, 1.2M, 1.3M, 1.5M, 1.5M, 1.6M, 1.7M, 1.8M, 1.9M, or 2M; proteasomes; or ferritin.
[0694] 327. The composition of embodiment 325 or 326, wherein the composition comprises 0.01-100 mg of the particles (e.g., 0.01-1, 1-10, 10-20, 20-30, 30-40, 40-50, 50-60, 60-70, 70-80, 80-90, or 90-100 mg of the particles).
[0695] 328. A method of disassembling a particle, the method comprising:
[0696] (a) providing a mixture comprising a particle and a denaturant, wherein the particle comprises:
   [0697] (i) a proteinaceous exterior comprising a plurality of Anellovirus ORF1 molecules, and
   [0698] (ii) a nucleic acid molecule (e.g., a nucleic acid endogenous to a host cell or a nucleic acid exogenous to a host cell, e.g., an anellovirus genome); and
[0699] (b) incubating the mixture under conditions suitable for:
   [0700] disassembly of the proteinaceous exterior, and
   [0701] dissociation of the nucleic acid molecule from the proteinaceous exterior.
[0702] 329. The method of embodiment 328, wherein the Anellovirus ORF1 molecules were made in mammalian cells.
[0703] 330. The method of embodiment 328 or 329, wherein the conditions suitable for disassembly of the proteinaceous exterior comprises one or more of: a predetermined conductivity, a detergent (e.g., SDS (e.g., 0.1% SDS), Tween, or Triton), a chaotropic agent (e.g., urea), a high salt solution (e.g., a solution comprising NaCl, e.g., at a concentration of at least about 1M, e.g., at least about 0.5, 0.6, 0.7, 0.8, 0.9, 1.0, 1.1, 1.2, 1.3, 1.4, 1.5, 2, 3, 4, or 5M), or conditions involving a predetermined temperature.
[0704] 331. The method of any of embodiments 328-330, wherein the mixture comprises a population of the particles.
[0705] 332. The method of any of embodiments 328-331, wherein the incubating of (b) results in at least 50%, 60% . . . 95%, or 100% of the population of particles being disassembled.
[0706] 333. The method of any of embodiments 328-332, further comprising a step of (c) removing (partially or completely) the nucleic acid molecule from the mixture, e.g., by washing.
[0707] 334. The method of any of embodiments 328-333, wherein the host cell is a human cell.
[0708] 335. A method of making an anellovector, the method comprising:
[0709] (a) providing a mixture comprising a plurality of Anellovirus ORF1 molecules, wherein at least 75%, 80%, 90%, 95%, 96%, 97%, 98%, 99%, or 100% of the plurality of ORF1 molecules are not comprised in a particle comprising about 40-80 (e.g., about 60) copies of an ORF1 molecule;
[0710] (b) subjecting the mixture to conditions suitable for in vitro assembly of the Anellovirus ORF1 molecules; and
[0711] (c) incubating the Anellovirus ORF1 molecules with a plurality of genetic elements, under conditions suitable for assembly of the Anellovirus ORF1 molecules into one or more anellovectors each enclosing one or more of the genetic elements.
[0712] 336. The method of embodiment 335, wherein the mixture provided in (a) is under denaturing conditions, e.g., wherein the mixture comprises a denaturant at a level sufficient to disassemble a complex (e.g., a proteinaceous exterior) comprising at least about 20, 30, 40, 50, or 60 copies, or 20-30, 30-40, 40-50, or 50-60 copies, of the Anellovirus ORF1 molecule.
[0713] 337. The method of embodiment 335 or 336, wherein the conditions suitable for in vitro assembly comprise reducing the concentration of a denaturant or removing the mixture from denaturing conditions.
[0714] 338. A method of making an anellovector, the method comprising:
[0715] (a) providing a mixture comprising a plurality of Anellovirus ORF1 molecules and subjecting the mixture to denaturing conditions (e.g., providing a denaturant as part of the mixture, e.g., contacting the mixture with a denaturant), wherein at least 75%, 80%, 90%, 95%, 96%, 97%, 98%, 99%, or 100% of the plurality of ORF1 molecules are not comprised in a particle comprising about 40-80 (e.g., about 60) copies of an ORF1 molecule;
[0716] (b) subjecting the mixture to non-denaturing conditions (e.g., reducing the concentration of the denaturant to a level) suitable for in vitro assembly of the Anellovirus ORF1 molecules (e.g., by dialysis); and
[0717] (c) incubating the Anellovirus ORF1 molecules with a plurality of genetic elements, under conditions suitable for assembly of the Anellovirus ORF1 molecules into one or more anellovectors each enclosing one or more of the genetic elements.
[0718] 339. The method of embodiment 338, wherein (b) and (c) are performed concurrently.
[0719] 340. The method of embodiment 338, wherein (b) is performed prior to (c).
[0720] 341. The method of any of embodiments 338-340, wherein the genetic elements are introduced into a mixture comprising the Anellovirus ORF1 molecules prior to, concurrently with, or after (b).
[0721] 342. The method of any of embodiments 338-341, wherein at least 75%, 80%, 90%, 95%, 96%, 97%, 98%, 99%, or 100% of the plurality of ORF1 molecules in the mixture of (a) are comprised in capsomers (e.g., decamers or particles of 25-40 nm in diameter, e.g., 25-30, 30-32, 32-35, or 35-40 nm in diameter or about 25, 26, 27, 28, 29, 30, 31, 32, 33, 34, 35, 36, 37, 38, 39, or 40 nm).
[0722] 343. The method of any of embodiments 338-342, wherein the ratio of ORF1 molecules in the mixture of (a) comprised in capsomers (e.g., decamers) compared to ORF1 molecules in the mixture of (a) comprised in particles is at least 2:1, 3:1, 4:1, 5:1, 10:1, 50:1, 100:1, 500:1, 1000:1, 5000:1, or 10,000:1.
[0723] 344. The method of any of embodiments 338-343, wherein at least 75%, 80%, 90%, 95%, 96%, 97%, 98%, 99%, or 100% of the plurality of ORF1 molecules after the incubating of (c) are comprised in anellovectors (e.g., 60 mers or particles of at least 30, 31, 32, 33, 34, or 35 nm in diameter).
[0724] 345. The method of any of embodiments 338-344, wherein the genetic element encodes an exogenous effector.
[0725] 346. The method of any of embodiments 338-345, wherein the genetic element is an oligonucleotide.
[0726] 347. The method of any of embodiments 338-346, wherein the genetic element does not encode a polypeptide or functional nucleic acid.
[0727] 348. The method of any of embodiments 338-347, wherein the concentration of the denaturant after step (b) is no more than about 0.01M, 0.1M, 0.2M, 0.3M, 0.4M, 0.5M, 0.6M, 0.7M, 0.8M, 0.9M, 1M, 1.1M, 1.2M, 1.3M, 1.5M, 1.5M, 1.6M, 1.7M, 1.8M, 1.9M, or 2M.
[0728] 349. The method of any of embodiments 338-248, wherein, after the incubating of (c), at least 75%, 80%, 90%, 95%, 96%, 97%, 98%, 99%, or 100% of the particles in the mixture comprise at least 50, 55, or 60 copies of an Anellovirus ORF1 molecule.
[0729] 350. The method of any of embodiments 338-349, wherein, after the incubating of (c), at least 90% of the particles in the mixture have a diameter of at least 30, 31, 32, 33, 34, or 35 nm.
[0730] 351. The method of any of embodiments 338-350, wherein, after the incubating of (c), at least 90%, 95%, 96%, 97%, 98%, 99%, or 100% of the particles in the mixture have a symmetrical morphology.
[0731] 352. The method of any of embodiments 338-351, wherein the denaturant is selected from a chaotropic agent (e.g., urea), heat (e.g., temperature above about 85, 86, 87, 88, 89, 90, 91, 92, 93, 94, or 95° C.), or pH (e.g., acidic pH or basic pH).
[0732] 353. A method of making an anelloVLP, the method comprising:
[0733] (a) providing a mixture comprising a plurality of Anellovirus ORF1 molecules, wherein at least 75%, 80%, 90%, 95%, 96%, 97%, 98%, 99%, or 100% of the plurality of ORF1 molecules are not comprised in a particle comprising about 40-80 (e.g., about 60) copies of an ORF1 molecule;
[0734] (b) subjecting the mixture to conditions suitable for in vitro assembly of the Anellovirus ORF1 molecules; and
[0735] (c) incubating the Anellovirus ORF1 molecules with a plurality of effectors (e.g., exogenous effectors), under conditions suitable for assembly of the Anellovirus ORF1 molecules into one or more anelloVLPs each enclosing one or more of the effectors.
[0736] 354. The method of embodiment 353, wherein the mixture provided in (a) is under denaturing conditions, e.g., wherein the mixture comprises a denaturant at a level sufficient to disassemble a complex (e.g., a proteinaceous exterior) comprising at least about 20, 30, 40, 50, or 60 copies, or 20-30, 30-40, 40-50, or 50-60 copies, of the Anellovirus ORF1 molecule.
[0737] 355. The method of embodiment 353 or 354, wherein the conditions suitable for in vitro assembly comprise reducing the concentration of a denaturant or removing the mixture from denaturing conditions.
[0738] 356. A method of making an anelloVLP, the method comprising:
[0739] (a) providing a mixture comprising a plurality of Anellovirus ORF1 molecules and a denaturant, wherein at least 75%, 80%, 90%, 95%, 96%, 97%, 98%, 99%, or 100% of the plurality of ORF1 molecules are not comprised in a particle comprising about 40-80 (e.g., about 60) copies of an ORF1 molecule;
[0740] (b) reducing the concentration of the denaturant to a level suitable for in vitro assembly of the Anellovirus ORF1 molecules; and
[0741] (c) incubating the Anellovirus ORF1 molecules with a plurality of effectors (e.g., exogenous effectors), under conditions suitable for in vitro assembly of the Anellovirus ORF1 molecules into one or more anelloVLPs each enclosing one or more of the effectors.
[0742] 357. The method of embodiment 356, wherein the effectors are introduced into a mixture comprising the Anellovirus ORF1 molecules prior to, concurrently with, or after (b).
[0743] 358. The method of embodiment 356 or 357, wherein at least 75%, 80%, 90%, 95%, 96%, 97%, 98%, 99%, or 100% of the plurality of ORF1 molecules in the mixture of (a) are comprised in capsomers (e.g., decamers or particles of at most 25-40 nm in diameter, e.g., 25-30, 30-32, 32-35, or 35-40 nm in diameter or about 25, 26, 27, 28, 29, 30, 31, 32, 33, 34, 35, 36, 37, 38, 39, or 40 nm).
[0744] 359. The method of any of embodiments 356-358, wherein the ratio of ORF1 molecules in the mixture of (a) comprised in capsomers (e.g., decamers) compared to ORF1 molecules in the mixture of (a) comprised in particles is at least 2:1, 3:1, 4:1, 5:1, 10:1, 50:1, 100:1, 500:1, 1000:1, 5000:1, or 10,000:1.
[0745] 360. The method of any of embodiments 356-359, wherein at least 75%, 80%, 90%, 95%, 96%, 97%, 98%, 99%, or 100% of the plurality of ORF1 molecules after the incubating of (c) are comprised in anelloVLPs (e.g., 60 mers or particles of at least 30, 31, 32, 33, 34, or 35 nm in diameter).
[0746] 361. The method of any of embodiments 356-360, wherein the anelloVLP has one or more of the following characteristics:
[0747] (i) does not comprise (e.g., does not enclose) a polynucleotide,
[0748] (ii) does not comprise (e.g., does not enclose) detectable levels of polynucleotides,
[0749] (iii) does not comprise (e.g., does not enclose) a polynucleotide of greater than 1000, 500, 200, or 100 nucleotides in length,
[0750] (iv) does not comprise (e.g., does not enclose) a polynucleotide comprising any contiguous nucleic acid sequences of at least 50, 100, 150, 200, 300, 400, 500, 600, 700, 800, 900, or 1000 nucleotides in length having least 75%, 80%, 85%, 90%, 95%, 96%, 97%, 98%, 99%, or 100% sequence identity to contiguous sequence in a wild-type Anellovirus genome (e.g., as described herein), and/or
[0751] (v) does not comprise a polynucleotide comprising an Anellovirus 5′ UTR or an origin of replication.
[0752] 362. The method of any of embodiments 356-361, wherein the concentration of the denaturant after step (b) is no more than about 0.01M, 0.1M, 0.2M, 0.3M, 0.4M, 0.5M, 0.6M, 0.7M, 0.8M, 0.9M, 1M, 1.1M, 1.2M, 1.3M, 1.5M, 1.5M, 1.6M, 1.7M, 1.8M, 1.9M, or 2M.
[0753] 363. The method of any of embodiments 356-362, wherein, after the incubating of (c), at least 75%, 80%, 90%, 95%, 96%, 97%, 98%, 99%, or 100% of the particles in the mixture comprise at least 50, 55, or 60 copies of an Anellovirus ORF1 molecule.
[0754] 364. The method of any of embodiments 356-363, wherein, after the incubating of (c), at least 90% of the particles in the mixture have a diameter of at least 30, 31, 32, 33, 34, or 35 nm.
[0755] 365. The method of any of embodiments 356-364, wherein, after the incubating of (c), at least 90%, 95%, 96%, 97%, 98%, 99%, or 100% of the particles in the mixture have a symmetrical morphology.
[0756] 366. The method of any of embodiments 356-365, wherein the denaturant is selected from a chaotropic agent (e.g., urea), heat (e.g., temperature above about 85, 86, 87, 88, 89, 90, 91, 92, 93, 94, or 95° C.), or pH (e.g., acidic pH or basic pH).
[0757] 367. A method of making an anelloVLP, the method comprising:
[0758] (a) providing a mixture comprising a particle and a denaturant, wherein the particle comprises:
   [0759] (i) a proteinaceous exterior comprising a plurality of Anellovirus ORF1 molecules, and
   [0760] (ii) a nucleic acid molecule (e.g., a host cell nucleic acid molecule); and
[0761] (b) incubating the mixture under conditions suitable for:
   [0762] disassembly of the proteinaceous exterior, and
   [0763] dissociation of the nucleic acid molecule from the proteinaceous exterior;
[0764] (c) providing a mixture comprising a plurality of Anellovirus ORF1 molecules and a denaturant, wherein at least 75%, 80%, 90%, 95%, 96%, 97%, 98%, 99%, or 100% of the plurality of ORF1 molecules are not comprised in a particle comprising about 40-80 (e.g., about 60) copies of an ORF1 molecule;
[0765] (d) reducing the concentration of the denaturant to a level suitable for in vitro assembly of the Anellovirus ORF1 molecules; and
[0766] (e) incubating the Anellovirus ORF1 molecules with a plurality of effectors (e.g., exogenous effectors), under conditions suitable for assembly of the Anellovirus ORF1 molecules into one or more anelloVLPs each enclosing one or more of the effectors.
[0767] 368. A polypeptide, e.g., an ORF1 molecule, comprising one or more of:
[0768] (a) a first region comprising an amino acid sequence having at least 70% (e.g., at least about 70, 80, 90, 95, 96, 97, 98, 99, or 100%) sequence identity to an arginine-rich region sequence described herein (e.g., MPYYYRRRRYNYRRPRWYGRGWIRRPFRRRFRRKRRVR (SEQ ID NO: 216) or MAWGWWKRRRRWWFRKRWTRGRLRRRWPRSARRRPRRRRVRRRRRWRRGRRKTRTYRRRR RFRRRGRK (SEQ ID NO: 186), or as listed in any one of Tables A1-A32) or a sequence of at least about 40 amino acids comprising at least 60%, 70%, or 80% basic residues (e.g., arginine, lysine, or a combination thereof),
[0769] (b) a second region comprising an amino acid sequence having at least 30% (e.g., at least about 30, 35, 40, 50, 60, 70, 80, 90, 95, 96, 97, 98, 99, or 100%) sequence identity to a jelly-roll region sequence described herein (e.g., PTYTTIPLKQWQPPYKRTCYIKGQDCLIYYSNLRLGMNSTMYEKSIVPVHWPGGGSFSVSMLTLD ALYDIHKLCRNWWTSTNQDLPLVRYKGCKITFYQSTFTDYIVRIHTELPANSNKLTYPNTHPLM MMMSKYKHIIPSRQTRRKKKPYTKIFVKPPPQFENKWYFATDLYKIPLLQIHCTACNLQNPFVKP DKLSNNVTLWSLNT (SEQ ID NO: 217), or as listed in any of any one of Tables A1-A32) or a sequence comprising at least 6 (e.g., at least 6, 7, 8, 9, 10, 11, or 12) beta strands;
[0770] (c) a third region comprising an amino acid sequence having at least 30% (e.g., at least about 30, 35, 40, 50, 60, 70, 80, 90, 95, 96, 97, 98, 99, or 100%) sequence identity to an N22 domain sequence described herein (e.g., TMALTPFNEPIFTQIQYNPDRDTGEDTQLYLLSNATGTGWDPPGIPELILEGFPLWLIYWGFADFQ KNLKKVTNIDTNYMLVAKTKFTQKPGTFYLVILNDTFVEGNSPYEKQPLPEDNIKWYPQVQYQL EAQNKLLQTGPFTPNIQGQLSDNISMFYKFYFK (SEQ ID NO: 219), or as listed in any of any one of Tables A1-A32); and
[0771] (d) a fourth region comprising an amino acid sequence having at least 30% (e.g., at least about 30, 35, 40, 50, 60, 70, 80, 90, 95, 96, 97, 98, 99, or 100%) sequence identity to an Anellovirus ORF1 C-terminal domain (CTD) sequence described herein (e.g., WGGSPPKAINVENPAHQIQYPIPRNEHETTSLQSPGEAPESILYSFDYRHGNYTTTALSRISQDWA LKDTVSKITEPDRQQLLKQALECLQISEETQEKKEKEVQQLISNLRQQQQLYRERIISLLKDQ (SEQ ID NO: 220), or as listed in any of any one of Tables A1-A32);
[0772] wherein the ORF1 molecule comprises at least one difference (e.g., a mutation, chemical modification, or epigenetic alteration) relative to a wild-type ORF1 protein (e.g., as described herein), e.g., an insertion, substitution, chemical or enzymatic modification, and/or deletion, e.g., a deletion of a domain (e.g., one or more of an arginine-rich region, jelly-roll domain, HVR, N22, or CTD, e.g., as described herein).
[0773] 369. The polypeptide of embodiment 368, wherein the amino acid sequences of the region of (a), (b), (c), and (d) have at least 90% sequence identity to their respective references.
[0774] 370. The polypeptide of embodiment 368, wherein the polypeptide comprises:
[0775] (i) the first region and the second region;
[0776] (ii) the first region and the third region;
[0777] (iii) the first region and the fourth region;
[0778] (iv) the second region and the third region;
[0779] (v) the second region and the fourth region;
[0780] (vi) the third region and the fourth region;
[0781] (vii) the first region, the second region, and the third region;
[0782] (viii) the first region, the second region, and the fourth region;
[0783] (ix) the first region, the third region, and the fourth region; or
[0784] (x) the second region, the third region, and the fourth region.
[0785] 371. The polypeptide of any of embodiments 368-370, wherein:
[0786] the first region comprises an amino acid sequence having at least 70% (e.g., at least about 70, 80, 90, 95, 96, 97, 98, 99, or 100%) sequence identity to an arginine-rich region sequence as listed in any one of Tables A1-A32;
[0787] the second region comprises an amino acid sequence having at least 70% (e.g., at least about 70, 80, 90, 95, 96, 97, 98, 99, or 100%) sequence identity to a jelly-roll region sequence as listed in any one of Tables A1-A32;
[0788] the third region comprises an amino acid sequence having at least 70% (e.g., at least about 70, 80, 90, 95, 96, 97, 98, 99, or 100%) sequence identity to an N22 domain sequence as listed in any one of Tables A1-A32; and/or
[0789] the fourth region comprises an amino acid sequence having at least 70% (e.g., at least about 70, 80, 90, 95, 96, 97, 98, 99, or 100%) sequence identity to a CTD sequence as listed in any one of Tables A1-A32.
[0790] 372. The polypeptide according to embodiment 371, wherein the amino acid sequences of the first, second, third and fourth region have at least 90% sequence identity to their respective references.
[0791] 373. The polypeptide of any of the preceding embodiments, wherein the polypeptide comprises, in N-terminal to C-terminal order, the first region, the second region, the third region, and the fourth region.
[0792] 374. The polypeptide of any of the preceding embodiments, wherein the at least one difference comprises at least one difference in the first region relative to the arginine-rich region of a wild-type ORF1 protein.
[0793] 375. The polypeptide of any of the preceding embodiments, wherein the first region comprises an arginine-rich region from the ORF1 protein of an Anellovirus other than the wild-type Anellovirus to which the polypeptide, or the portion thereof excluding the first region, has greatest sequence identity.
[0794] 376. The polypeptide of any of the preceding embodiments, wherein the first region comprises an amino acid sequence having at least 70% sequence identity to the arginine-rich region from an Anellovirus other than the wild-type Anellovirus to which the polypeptide has greatest sequence identity.
[0795] 377. The polypeptide of any of the preceding embodiments, wherein the second region comprises a jelly-roll region from the ORF1 protein of an Anellovirus other than the wild-type Anellovirus to which the polypeptide, or the portion thereof excluding the second region, has greatest sequence identity.
[0796] 378. The polypeptide of any of the preceding embodiments, wherein the second region comprises an amino acid sequence having at least 70% sequence identity to the jelly-roll region from an Anellovirus other than the wild-type Anellovirus to which the polypeptide has greatest sequence identity.
[0797] 379. The polypeptide of any of the preceding embodiments, wherein the third region comprises an N22 domain from the ORF1 protein of an Anellovirus other than the wild-type Anellovirus to which the polypeptide, or the portion thereof excluding the third region, has greatest sequence identity.
[0798] 380. The polypeptide of any of the preceding embodiments, wherein the third region comprises an amino acid sequence having at least 70% sequence identity to the N22 region from an Anellovirus other than the wild-type Anellovirus to which the polypeptide has greatest sequence identity.
[0799] 381. The polypeptide of any of the preceding embodiments, wherein the fourth region comprises a CTD domain from the ORF1 protein of an Anellovirus other than the wild-type Anellovirus to which the polypeptide, or the portion thereof excluding the fourth region, has greatest sequence identity.
[0800] 382. The polypeptide of any of the preceding embodiments, wherein the fourth region comprises an amino acid sequence having at least 70% sequence identity to the CTD region from an Anellovirus other than the wild-type Anellovirus to which the polypeptide has greatest sequence identity.
[0801] 383. The polypeptide of any of embodiments 368-382, wherein the HVR sequence is positioned between the second region and the third region.
[0802] 384. The polypeptide of embodiment 383, wherein the HVR sequence comprises an amino acid sequence having at least 70% (e.g., at least about 70, 80, 90, 95, 96, 97, 98, 99, or 100%) sequence identity to the HVR from an Anellovirus other than the wild-type Anellovirus to which the ORF1 protein has greatest sequence identity.
[0803] 385. The polypeptide of any of embodiment 383 or 384, wherein the HVR sequence is heterologous relative to one or more of the first region, second region, third region, and/or fourth region.
[0804] 386. The polypeptide of any of embodiments 383-385, wherein the HVR sequence comprises an HVR from the ORF1 protein of an Anellovirus other than the wild-type Anellovirus to which the polypeptide, or the portion thereof excluding the HVR sequence, has greatest sequence identity.
[0805] 387. The polypeptide of any of embodiments 383-386, wherein the HVR sequence comprises an amino acid sequence having at least 70% sequence identity to the HVR from an Anellovirus other than the wild-type Anellovirus to which the polypeptide has greatest sequence identity.
[0806] 388. The anellovector of any of the preceding embodiments, wherein the proteinaceous exterior comprises a polypeptide of any of embodiments 368-387.
[0807] 389. The particle of any of the preceding embodiments, wherein the proteinaceous exterior comprises a polypeptide of any of embodiments 368-387.
[0808] 390. The anelloVLP of any of the preceding embodiments, wherein the proteinaceous exterior comprises a polypeptide of any of embodiments 368-387.
[0809] 391. A method of making two or more different Anellovirus ORF molecules, the method comprising:
[0810] (i) providing an insect cell comprising a nucleic acid construct encoding two or more different Anellovirus ORF molecules (e.g., two or more of an ORF1, ORF2, ORF2/2, ORF2/3, ORF1/1, and/or ORF1/2 molecule);
[0811] (ii) incubating the insect cell under conditions suitable for expression of the two or more different Anellovirus ORF molecules.
[0812] 392. The method of embodiment 391, wherein the nucleic acid construct comprises sequences encoding all of an ORF1, ORF2, ORF2/2, ORF2/3, ORF1/1, and/or ORF1/2 molecule.
[0813] 393. The method of embodiment 391, further comprising incubating the insect cell under conditions suitable for secretion of the Anellovirus ORF molecule.
[0814] 394. The method of embodiment 391, further comprising isolating the Anellovirus ORF molecule from the insect cell.
[0815] 395. The method of embodiment 394, wherein the isolating step comprises lysing the insect cell.
[0816] 396. The method of any of embodiments 391-395, wherein the Anellovirus ORF comprises an Anellovirus ORF1 molecule.
[0817] 397. A method of making an Anellovirus ORF1 molecule, the method comprising:
[0818] (i) providing an insect cell comprising a nucleic acid construct encoding an Anellovirus ORF1 molecule, wherein:
   [0819] (a) the Anellovirus ORF1 molecule has a molecular weight of at least 101 kDa,
   [0820] (b) the Anellovirus ORF1 molecule is a full-length Anellovirus ORF1 protein,
   [0821] (c) a plurality of the Anellovirus ORF1 molecules, when in the presence of an Anellovirus genetic element, enclose the Anellovirus genetic element,
   [0822] (d) the Anellovirus ORF1 molecule is not a TTV ORF1 protein,
   [0823] (e) the Anellovirus ORF1 molecule is a Betatorquevirus or Gammatorquevirus ORF1 molecule; or
   [0824] (f) the Anellovirus ORF1 molecule comprises an Anellovirus ORF1 Arginine-rich region and an Anellovirus C-terminal domain;
[0825] (ii) incubating the insect cell under conditions suitable for expression of the Anellovirus ORF1 molecule.
[0826] 398. The method of embodiment 397, further comprising incubating the insect cell under conditions suitable for secretion of the Anellovirus ORF1 molecule.
[0827] 399. The method of embodiment 397, further isolating the Anellovirus ORF1 molecule from the insect cell.
[0828] 400. The method of embodiment 399, wherein the isolating step comprises lysing the insect cell.
[0829] 401. The method of any of the preceding embodiments, wherein the incubation step produces an amount of the Anellovirus ORF1 molecule detectable by Western blot, e.g., as described herein.
[0830] 402. A method of making an Anellovirus ORF molecule (e.g., an ORF1, ORF2, ORF2/2, ORF2/3, ORF1/1, and/or ORF1/2 molecule), the method comprising:
[0831] (i) providing an insect cell (e.g., an Sf9 cell) comprising a nucleic acid construct encoding the Anellovirus ORF molecule;
[0832] (ii) incubating the insect cell under conditions suitable for expression of a plurality of the Anellovirus ORF molecules; and
[0833] (iii) optionally isolating, purifying, and/or enriching the plurality of Anellovirus ORF molecules from the insect cell or other components or constituents thereof;
[0834] thereby making the Anellovirus ORF molecule.
[0835] 403. The method of embodiment 402, wherein the Anellovirus ORF molecule is fused to a marker (e.g., a His tag), e.g., at its N-terminal end or at its C-terminal end (e.g., as described in Table E1 and/or Example 9).
[0836] 404. The method of embodiment 402 or 403, wherein the insect cell further comprises a nucleic acid construct encoding one or more additional Anellovirus ORF molecules (e.g., one or more of an ORF1, ORF2, ORF2/2, ORF2/3, ORF1/1, and/or ORF1/2 molecule), and wherein the method further comprises:
[0837] incubating the insect cell under conditions suitable for expression of a plurality of the one or more additional Anellovirus ORF molecules, e.g., prior to, concurrently with, or subsequent to step (ii); and
[0838] optionally isolating, purifying, and/or enriching the plurality of the one or more additional Anellovirus ORF molecules from the insect cell or other components or constituents thereof, e.g., prior to, concurrently with, or subsequent to step (iii).
[0839] 405. The method of embodiment 404, wherein the nucleic acid construct encoding the one or more additional Anellovirus ORF molecules is the same as the nucleic acid construct of (i).
[0840] 406. The method of embodiment 405, wherein the nucleic acid construct of (i) comprises sequences encoding 2, 3, 4, 5, or all 6 of an Anellovirus ORF1, ORF2, ORF2/2, ORF2/3, ORF1/1, and/or ORF1/2 molecule.
[0841] 407. The method of embodiment 405, wherein the nucleic acid construct of (i) encodes an Anellovirus ORF1, ORF2, ORF2/2, ORF2/3, ORF1/1, and ORF1/2 molecule.
[0842] 408. The method of embodiment 405, wherein the nucleic acid construct of (i) comprises the full open reading frame region of an Anellovirus genome.
[0843] 409. The method of embodiment 404, wherein the nucleic acid construct encoding the one or more additional Anellovirus ORF molecules is different from the nucleic acid construct of (i).
[0844] 410. The method of any of embodiments 404-409, wherein the Anellovirus ORF molecules are from the same Anellovirus genome.
[0845] 411. The method of any of embodiments 404-409, wherein the Anellovirus ORF molecules are from a plurality of Anellovirus genomes (e.g., wherein the ORF1 molecule is from one Anellovirus genome and the ORF2 molecule is from a different Anellovirus genome).
[0846] 412. The method of any of embodiments 404-411, wherein one or more of the Anellovirus ORF molecules are from an Alphatorquevirus.
[0847] 413. The method of any of embodiments 404-412, wherein one or more of the Anellovirus ORF molecules are from a Betatorquevirus.
[0848] 414. The method of any of embodiments 404-413, wherein one or more of the Anellovirus ORF molecules are from a Gammatorquevirus.
[0849] 415. The method of any of embodiments 404-414, wherein the nucleic acid construct or constructs each comprises a promoter (e.g., a promoter controlling expression of one or more of the Anellovirus ORF molecules, e.g., a baculovirus polyhedron promoter).
[0850] 416. The method of any of embodiments 404-415, further comprising incubating the insect cell under conditions suitable for secretion of the Anellovirus ORF molecules.
[0851] 417. The method of any of embodiments 404-416, wherein the isolating step comprises lysing the insect cell.
[0852] 418. The method of any of embodiments 404-417, wherein the incubation step produces an amount of the Anellovirus ORF molecule (e.g., ORF1 molecule) detectable by Western blot, e.g., as described herein.
[0853] 419. The method of any of embodiments 404-418, wherein the incubation step produces at least 1, 2, 3, 4, 5, or 6 mg of the Anellovirus ORF1 molecule per 1 L of cell culture (e.g., Sf9 culture).
[0854] 420. The method of any of the preceding embodiments, wherein the Anellovirus ORF molecules are isolated, purified, or enriched by isopycnic centrifugation.
[0855] 421. The method of any of the preceding embodiments, wherein the Anellovirus ORF molecule is an Anellovirus ORF1 molecule, and wherein the method further comprises:
[0856] contacting, in vitro, the isolated, purified, or enriched Anellovirus ORF1 molecule with a genetic element under conditions suitable for enclosure of the genetic element by a proteinaceous exterior comprising the Anellovirus ORF1 molecule, e.g., as described herein.
[0857] 422. An Anellovector genetic element comprising:
[0858] a) a recombinase hybrid site;
[0859] b) one or both of an Anellovirus 5′ NCR sequence and Anellovirus 3′ NCR sequence, and
[0860] c) a sequence encoding an exogenous effector.
[0861] 423. An Anellovector genetic element comprising:
[0862] a) a recombinase hybrid site;
[0863] b) an Anellovirus NCR, and
[0864] c) a sequence encoding an exogenous effector.
[0865] 424. The Anellovector genetic element of embodiment 422 or 423, which does not comprise a vector backbone.
[0866] 425. The Anellovector genetic element of any of the preceding embodiments, which is less than 5 kb, 4 kb, or 3 kb in length.
[0867] 426. The Anellovector genetic element of any of the preceding embodiments, which comprises, from upstream to downstream, the recombinase hybrid site, the Anellovirus 3′ NCR sequence, the Anellovirus 5′ NCR sequence, and the sequence encoding an exogenous effector.
[0868] 427. The Anellovector genetic element of any of the preceding embodiments, wherein the recombinase hybrid site is not situated between the Anellovirus 5′ NCR sequence and the Anellovirus 3′ NCR sequence.
[0869] 428. The Anellovector genetic element of any of the preceding embodiments, which comprises, from upstream to downstream, the Anellovirus 3′ NCR sequence, the recombinase hybrid site, the Anellovirus 5′ NCR sequence, and the sequence encoding an exogenous effector.
[0870] 429. The Anellovector genetic element of any of the preceding embodiments, wherein the recombinase hybrid site is situated between the Anellovirus 5′ NCR sequence and the Anellovirus 3′ NCR sequence.
[0871] 430. The Anellovector genetic element of any of the preceding embodiments, which comprises, from upstream to downstream, the recombinase hybrid site, the Anellovirus NCR sequence, and the sequence encoding an exogenous effector.
[0872] 431. The Anellovector genetic element of any of the preceding embodiments, which comprises, from upstream to downstream, the Anellovirus NCR sequence, and the sequence encoding an exogenous effector.
[0873] 432. The Anellovector genetic element of any of the preceding embodiments, wherein the recombinase hybrid site is a loxP site, an attL site, or an attR site.
[0874] 433. The Anellovector genetic element of any of the preceding embodiments, wherein the recombinase hybrid site is a loxP site.
[0875] 434. The Anellovector genetic element of any of the preceding embodiments, wherein the recombinase hybrid site is an attR site.
[0876] 435. The Anellovector genetic element of any of the preceding embodiments, wherein the recombinase hybrid site has a nucleotide sequence of a recombinase hybrid site as listed in any of Tables V3-V5, or a sequence having at last 80%, 85%, 90%, or 95% identity thereto.
[0877] 436. The Anellovector genetic element of any of the preceding embodiments, which is circular.
[0878] 437. The Anellovector genetic element of any of the preceding embodiments, which is single stranded.
[0879] 438. The Anellovector genetic element of any of the preceding embodiments, which is double stranded.
[0880] 439. An Anellovector genetic element construct comprising the nucleic acid sequences of b) and c) of an Anellovector genetic element of any of the preceding embodiments.
[0881] 440. The Anellovector genetic element construct of embodiment 439, which is double-stranded DNA.
[0882] 441. The Anellovector genetic element construct of any of the preceding embodiments, which further comprises a first recombinase recognition site (e.g., as described herein) and a second recombinase recognition site (e.g., as described herein).
[0883] 442. The Anellovector genetic element construct of embodiment 441, wherein the first recombinase recognition site and the second recombinase recognition site flank the nucleic acid sequences of b) and c) of the Anellovector genetic element.
[0884] 443. The Anellovector genetic element construct of any of the preceding embodiments, which further comprises a vector backbone suitable for replication in a host cell (e.g., a mammalian cell or a bacterial cell).
[0885] 444. The Anellovector genetic element of any of the preceding embodiments, which comprises an Anellovirus origin of replication.
[0886] 445. The Anellovector genetic element of any of the preceding embodiments, which does not comprise a bacterial origin of replication.
[0887] 446. A host cell comprising the Anellovector genetic element of any of the preceding embodiments.
[0888] 447. The host cell of embodiment 446, wherein the host cell is a mammalian cell.
[0889] 448. The host cell of embodiment 447, wherein the host cell is a bacterial cell.
[0890] 449. An Anellovector particle comprising the Anellovector genetic element of any of the preceding embodiments, encapsulation in a proteinaceous exterior.
[0891] 450. The Anellovector particle of embodiment 449, wherein the proteinaceous exterior comprises an ORF1 molecule.
[0892] 451. A preparation comprising a plurality of the Anellovector genetic elements of any of the preceding embodiments.
[0893] 452. The preparation of embodiment 451, which further comprises a first DNA construct according to any of the preceding embodiments.
[0894] 453. The preparation of any of the preceding embodiments, which does not comprise a detectable amount of wild-type Anellovirus genetic elements.
[0895] 454. The preparation of any of the preceding embodiments, which comprises fewer than 1 wild-type Anellovirus genetic elements per 1000 copies of the Anellovector genetic element.
[0896] 455. The preparation of any of the preceding embodiments, which does not comprise a detectable amount of wild-type Anellovirus particles.
[0897] 456. The preparation of any of the preceding embodiments, which comprises fewer than 1 wild-type Anellovirus particles per 1000 copies of particles comprising the Anellovector genetic element.
[0898] 457. A method of treating a disease or disorder in the subject in need thereof, the method comprising:
[0899] administering the Anellovector particle or preparation of any of the preceding embodiments to the subject,
[0900] wherein the exogenous effector is expressed in the subject,
[0901] thereby treating the disease or disorder in the subject.
[0902] 458. A first DNA construct (e.g., a genetic element construct) comprising, in order:
[0903] a) a first recombinase recognition site (e.g., a loxP site);
[0904] b) an Anellovector genetic element sequence comprising a sequence encoding an exogenous effector;
[0905] c) a second recombinase recognition site (e.g., a loxP site) in the same orientation as the first recombinase recognition site; and
[0906] d) a vector backbone suitable for replication in a host cell (e.g., a mammalian cell or a bacterial cell);
[0907] wherein the first and second recombinase recognition sites are recognized by the same site-specific recombinase, and
[0908] wherein the DNA construct is circular and double stranded.
[0909] 459. The first DNA construct of embodiment 458, wherein the site-specific recombinase is a serine recombinase or a tyrosine recombinase.
[0910] 460. The first DNA construct of any of the preceding embodiments, wherein the site-specific recombinase is a unidirectional recombinase or a bidirectional recombinase.
[0911] 461. The first DNA construct of any of the preceding embodiments, wherein the first recombinase recognition site has the same nucleic acid sequence as the second recombinase recognition site.
[0912] 462. The first DNA construct of any of the preceding embodiments, wherein the first recombinase recognition site has a different nucleic acid sequence as the second recombinase recognition site.
[0913] 463. The first DNA construct of any of the preceding embodiments, wherein the site-specific recombinase comprises a nuclear localization signal (e.g., an SV40 nuclear localization signal).
[0914] 464. The first DNA construct of any of the preceding embodiments, wherein the site-specific recombinase comprises an epitope tag (e.g., an HA tag, e.g., comprising the amino acid sequence YPYDVPDYA (SEQ ID NO: 2504)).
[0915] 465. The first DNA construct of any of the preceding embodiments, wherein the first and second recombinase recognition sites are loxP sites (e.g., a loxP, lox66, or lox71 site as listed in Table V3) and the site-specific recombinase is Cre (e.g., comprising the amino acid sequence of Cre, e.g., as listed in Table V2, or an amino acid sequence having at least 75%, 80%, 85%, 90%, 95%, 96%, 97%, 98%, or 99% sequence identity thereto).
[0916] 466. The first DNA construct of any of the preceding embodiments, wherein the first and second recombinase recognition sites are loxP sites (e.g., a loxP, lox66, or lox71 site as listed in Table V3), and wherein the site specific recombinase further comprises a nuclear localization signal (e.g., an SV40 nuclear localization signal, e.g., as described herein).
[0917] 467. The first DNA construct of embodiment 466, wherein the site-specific recombinase is SV40-NLS_iCre (e.g., comprising the amino acid sequence of SV40-NLS_iCre as listed in Table V2, or an amino acid sequence having at least 75%, 80%, 85%, 90%, 95%, 96%, 97%, 98%, or 99% sequence identity thereto).
[0918] 468. The first DNA construct of any of the preceding embodiments, wherein the first recombinase recognition site is an attP site (e.g., as listed Table V4), the second recombinase recognition site is an attB site (e.g., as listed Table V4), and the site-specific recombinase is Bxb1 (e.g., comprising the amino acid sequence of a Bxb1 as listed in Table V2, or an amino acid sequence having at least 75%, 80%, 85%, 90%, 95%, 96%, 97%, 98%, or 99% sequence identity thereto).
[0919] 469. The first DNA construct of any of the preceding embodiments, wherein the first recombinase recognition site is an attP site (e.g., as listed in Table V4), and wherein the site specific recombinase further comprises a nuclear localization signal (e.g., an SV40 nuclear localization signal);
[0920] optionally wherein the site-specific recombinase further comprises an epitope tag (e.g., an HA tag, e.g., comprising the amino acid sequence YPYDVPDYA (SEQ ID NO: 2504).
[0921] 470. The first DNA construct of embodiment 469, wherein the first recombinase recognition site is an attP site (e.g., as listed Table V4), the second recombinase recognition site is an attB site (e.g., as listed Table V4), and the site-specific recombinase is SV40-NLS-HA_Bxb1 (e.g., comprising the amino acid sequence of SV40-NLS-HA_Bxb1 as listed in Table V2, or an amino acid sequence having at least 75%, 80%, 85%, 90%, 95%, 96%, 97%, 98%, or 99% sequence identity thereto).
[0922] 471. The first DNA construct of any of the preceding embodiments, wherein the first recombinase recognition site is an attP site (e.g., as listed Table V5), the second recombinase recognition site is an attB site (e.g., as listed Table V5), and the site-specific recombinase is PhiC31 (e.g., comprising the amino acid sequence of a PhiC31 as listed in Table V2, or an amino acid sequence having at least 75%, 80%, 85%, 90%, 95%, 96%, 97%, 98%, or 99% sequence identity thereto).
[0923] 472. The first DNA construct of any of the preceding embodiments, wherein the first and second recombinase recognition sites are FRT sites (e.g., comprising a nucleic acid sequence as listed in Table 1 of Turan et al. 2011, FASEB J. 25:4088-4107; incorporated by reference herein in its entirety) and the site-specific recombinase is Flp.
[0924] 473. The first DNA construct of any of the preceding embodiments, wherein the site-specific recombinase is a serine recombinase.
[0925] 474. The first DNA construct of embodiment 473, wherein the site-specific recombinase is selected from PhiC31, Bxb1, R4, ParA resolvase, Tn3, Gin, and γδ.
[0926] 475. The first DNA construct of any of the preceding embodiments, wherein the site-specific recombinase is a tyrosine recombinase.
[0927] 476. The first DNA construct of embodiment 475, wherein the site-specific recombinase is selected from Cre, Dre, Flp, KD, B2, B3, lambda integrase, HKo22, and HP1.
[0928] 477. The first DNA construct of any of the preceding embodiments, wherein the site-specific recombinase is A118 or (DFC1.
[0929] 478. The first DNA construct of any of the preceding embodiments, wherein the site-specific recombinase is a ParA resolvase (e.g., comprising the amino acid sequence of ParA as listed in Table V2, or an amino acid sequence having at least 75%, 80%, 85%, 90%, 95%, 96%, 97%, 98%, or 99% sequence identity thereto).
[0930] 479. The first DNA construct of any of the preceding embodiments, wherein the first recombinase recognition site has a nucleotide sequence of a recombinase recognition site as listed in any of Tables V1, V3-V5, or a sequence having at last 80%, 85%, 90%, or 95% identity thereto.
[0931] 480. The first DNA construct of any of the preceding embodiments, wherein the second recombinase recognition site has a nucleotide sequence of a recombinase recognition site as listed in any of Tables V1, V3-V5, or a sequence having at last 80%, 85%, 90%, or 95% identity thereto.
[0932] 481. The first DNA construct of any of the preceding embodiments, wherein the site-specific recombinase has an amino acid sequence of a recombinase as listed in any of V1 or V2, or a sequence having at last 80%, 85%, 90%, or 95% identity thereto.
[0933] 482. The first DNA construct of any of the preceding embodiments, wherein the Anellovector genetic element comprises a 5′ NCR sequence and a 3′ NCR sequence.
[0934] 483. The first DNA construct of embodiment 482, wherein the Anellovirus 5′ NCR has the sequence of a wild-type Anellovirus 5′ NCR or comprises at least one sequence difference relative to the wild-type Anellovirus 5′ NCR.
[0935] 484. The first DNA construct of embodiment 482, wherein the Anellovirus 3′ NCR has the sequence of a wild-type Anellovirus 3′ NCR or comprises at least one sequence difference relative to the wild-type Anellovirus 3′ NCR.
[0936] 485. The first DNA construct of any of the preceding embodiments, wherein the Anellovector genetic element comprises an Anellovirus NCR sequence.
[0937] 486. The first DNA construct of embodiment 485, wherein the Anellovirus NCR has the sequence of a wild-type Anellovirus NCR or comprises at least one sequence difference relative to the wild-type Anellovirus NCR.
[0938] 487. The first DNA construct of embodiment 482, wherein the 5′ NCR is situated between the sequence that encodes the exogenous effector and the 3′ NCR, e.g., wherein the 5′ NCR and 3′ NCR are both upstream of the sequence that encodes the exogenous effector.
[0939] 488. The first DNA construct of embodiment 482, wherein the sequence that encodes the exogenous effector is situated between the 5′ NCR and the 3′ NCR.
[0940] 489. The first DNA construct of any of the preceding embodiments, wherein the 3′ NCR comprises a GC-rich region.
[0941] 490. The first DNA construct of any of the preceding embodiments, wherein the Anellovirus NCR comprises a GC-rich region.
[0942] 491. The first DNA construct of any of the preceding embodiments, wherein the Anellovector genetic element does not encode any one or more of (e.g., does not comprise any of) an ORF1, ORF2, ORF2/2, ORF2/3, ORF1/1, or ORF1/2 molecule.
[0943] 492. The first DNA construct of any of the preceding embodiments, wherein the Anellovector genetic element encodes one or more of (e.g., all of) an ORF1, ORF2, ORF2/2, ORF2/3, ORF1/1, or ORF1/2 molecule.
[0944] 493. The first DNA construct of any of the preceding embodiments, wherein the Anellovector genetic element further comprises a promoter operably linked to the sequence encoding the exogenous effector.
[0945] 494. The first DNA construct of any of the preceding embodiments, wherein the Anellovector genetic element further comprises a transcription terminator element, e.g., situated downstream of the sequence encoding the exogenous effector
[0946] 495. The first DNA construct of any of the preceding embodiments, wherein the Anellovector genetic element has a length of about 1.5-2.0, 2.0-2.5, 2.5-3.0, 3.0-3.5, 3.1-3.6, 3.2-3.7, 3.3-3.8, 3.4-3.9, 3.5-4.0, 4.0-4.5, or 4.5-5.0 kb.
[0947] 496. The first DNA construct of any of the preceding embodiments, wherein the Anellovector genetic element has a length less than about 1.5, 2.0, 2.5, 3.0, 3.5, 4.0, 4.5, or 5.0 kb.
[0948] 497. The first DNA construct of any of the preceding embodiments, wherein the vector backbone comprises one or both of an origin of replication and a selection marker (e.g., an antibiotic resistance marker).
[0949] 498. The first DNA construct of embodiment 497, wherein the origin of replication is a mammalian origin (e.g., a viral origin of replication from a virus that infects a mammalian cell).
[0950] 499. The first DNA construct of embodiment 497, wherein the origin of replication is a bacterial origin, wherein optionally the bacterial origin comprises an ColE1, pMB1, pBR322, or pUC.
[0951] 500. The first DNA construct of any of the preceding embodiments, wherein the vector backbone is at least 1, 2, 3, or 4 kb in length.
[0952] 501. The first DNA construct of any of the preceding embodiments, wherein the vector backbone has a length of 1-2, 2-3, 3-4 kb, or 4-5 kb in length.
[0953] 502. The first DNA construct of any of the preceding embodiments, which has a size that does not permit substantial packaging in a proteinaceous exterior comprising a plurality of ORF1 molecules.
[0954] 503. The first DNA construct of any of the preceding embodiments, which has a size of at least 5, 6, 7, 8, 9, or 10 kb.
[0955] 504. The first DNA construct of any of the preceding embodiments, which has a size of 5-6 kb, 6-7 kb, 7-8 kb, 8-9 kb, or 9-10 kb.
[0956] 505. The first DNA construct of any of the preceding embodiments, wherein the vector backbone comprises a sequence encoding the site-specific recombinase.
[0957] 506. The first DNA construct of any of the preceding embodiments, wherein the vector backbone does not comprise a sequence encoding a site-specific recombinase.
[0958] 507. A DNA construct (e.g., a second DNA construct) comprising:
   [0959] a) one or more of (e.g., 1, 2, or all 3 of): a sequence encoding an ORF1 molecule, a sequence encoding an ORF2 molecule, and a sequence encoding an ORF3 molecule;
   [0960] b) optionally a sequence encoding a replication protein (e.g., a large T antigen, or a functional fragment, mutant, or variant thereof); and
   [0961] c) an exogenous origin (e.g., an exogenous viral origin, e.g., an SV40, PCV, or AAV origin).
[0962] 508. The DNA construct of embodiment 507, which comprises the sequence encoding the replication protein (e.g., the large T antigen).
[0963] 509. The DNA construct of embodiment 507, which does not comprise the sequence encoding the replication protein (e.g., the large T antigen).
[0964] 510. The DNA construct of any of the preceding embodiments, wherein the exogenous origin of c) is an SV40 origin.
[0965] 511. The DNA construct of any of the preceding embodiments, wherein the exogenous origin of c) is an PCV origin.
[0966] 512. The DNA construct of embodiment 511, wherein the replication protein comprises a PCV Rep and/or a PCV Rep'.
[0967] 513. The DNA construct of any of the preceding embodiments, wherein the exogenous origin of c) is an AAV origin (e.g., an AAV minimal origin).
[0968] 514. The DNA construct of embodiment 513, wherein the replication protein comprises a AAV Rep.
[0969] 515. The DNA construct of any of the preceding embodiments, which does not comprise an Anellovirus 5′ NCR sequence, or a portion thereof comprising the sequence of 10-20, 20-30, 30-40 40-50, 50-60, 60-70, 70-80, 80-90, 90-100, 100-125, 125-150, 150-160, 160-70, or 170-200 contiguous nucleotides therefrom.
[0970] 516. The DNA construct of any of the preceding embodiments, which does not comprise an Anellovirus 3′ NCR sequence, or a portion thereof comprising the sequence of 10-20, 20-30, 30-40 40-50, 50-60, 60-70, 70-80, 80-90, 90-100, 100-125, 125-150, 150-160, 160-70, or 170-200 contiguous nucleotides therefrom.
[0971] 517. The DNA construct of any of the preceding embodiments, which:
[0972] (i) does not comprise an Anellovirus 5′ NCR sequence, or a portion thereof comprising the sequence of 10-20, 20-30, 30-40 40-50, 50-60, 60-70, 70-80, 80-90, 90-100, 100-125, 125-150, 150-160, 160-70, or 170-200 contiguous nucleotides therefrom; and
[0973] (ii) does not comprise an Anellovirus 3′ NCR sequence, or a portion thereof comprising the sequence of 10-20, 20-30, 30-40 40-50, 50-60, 60-70, 70-80, 80-90, 90-100, 100-125, 125-150, 150-160, 160-70, or 170-200 contiguous nucleotides therefrom.
[0974] 518. The DNA construct of any of the preceding embodiments, which does not comprise an Anellovirus NCR sequence, or a portion thereof comprising the sequence of 10-20, 20-30, 30-40 40-50, 50-60, 60-70, 70-80, 80-90, 90-100, 100-125, 125-150, 150-160, 160-70, 170-200, 200-225, 225-250, 250-275, 275-300, 300-350, or 350-400 contiguous nucleotides therefrom.
[0975] 519. The DNA construct of any of the preceding embodiments, which comprises less than 150, 151, 152, 153, 154, 155, 156, 157, 158, 159, 160, 161, 162, 163, 164, or 165 nucleotides of contiguous nucleic acid sequence of an Anellovirus 5′ NCR.
[0976] 520. The DNA construct of any of the preceding embodiments, which comprises less than 150, 151, 152, 153, 154, 155, 156, 157, 158, 159, 160, 161, 162, 163, 164, or 165 nucleotides of contiguous nucleic acid sequence of an Anellovirus 3′ NCR.
[0977] 521. The DNA construct of any of the preceding embodiments, which comprises:
[0978] (i) less than 150, 151, 152, 153, 154, 155, 156, 157, 158, 159, 160, 161, 162, 163, 164, or 165 nucleotides of contiguous nucleic acid sequence of an Anellovirus 5′ NCR; and
[0979] (ii) less than 150, 151, 152, 153, 154, 155, 156, 157, 158, 159, 160, 161, 162, 163, 164, or 165 nucleotides of contiguous nucleic acid sequence of an Anellovirus 3′ NCR.
[0980] 522. The DNA construct of any of the preceding embodiments, which further comprises an IRES, e.g., wherein the IRES is situated between a) and b), e.g., wherein the IRES is immediately upstream of the sequence encoding the large T antigen.
[0981] 523. The DNA construct of embodiment 521 or 522, which further comprises selectable marker, e.g., wherein the selectable marker comprises a resistance marker (e.g., a kanamycin resistance gene).
[0982] 524. The DNA construct of any of the preceding embodiments, which comprises an expression cassette comprising the sequence encoding the large T antigen and the SV40 origin.
[0983] 525. The DNA construct of any of the preceding embodiments, which further comprises one or more additional expression cassettes (e.g., 1, 2, 3, 4, 5, or more additional expression cassettes).
[0984] 526. The DNA construct of any of the preceding embodiments, wherein the sequence encoding the ORF1 molecule, the sequence encoding the ORF2 molecule, and the sequence encoding the ORF3 molecule are part of a single expression cassette.
[0985] 527. The DNA construct of any of the preceding embodiments, wherein the sequence encoding the ORF2 molecule, and the sequence encoding the ORF3 molecule are part of a single expression cassette, optionally wherein the expression cassette comprises a sequence encoding a nonfunctional ORF1 (e.g., a sequence that comprises a premature stop codon or lacks a start codon relative to a wild-type ORF1 gene).
[0986] 528. The DNA construct of any of the preceding embodiments, wherein the sequence encoding the ORF1 molecule is part of a first expression cassette and the sequence encoding the ORF2 molecule and the sequence encoding the ORF3 molecule are part of a second expression cassette.
[0987] 529. The DNA construct of any of the preceding embodiments, which further comprises a second sequence encoding an ORF1 molecule, e.g., wherein the second sequence encoding the ORF1 molecule is part of a separate expression cassette from the expression cassette that comprises the ORF1 molecule of a).
[0988] 530. The DNA construct of any of the preceding embodiments, which further comprises an expression cassette encoding a transgene, e.g., a site-specific recombinase.
[0989] 531. The DNA construct of any of the preceding embodiments, wherein the expression cassettes are in the same orientation.
[0990] 532. The DNA construct of any of the preceding embodiments, wherein one or more of the expression cassettes are in opposite orientations.
[0991] 533. A system comprising a first DNA construct according to any of the preceding embodiments and a second DNA construct according to any of the preceding embodiments.
[0992] 534. The system of embodiment 533, which further comprises a third DNA construct encoding the site-specific recombinase.
[0993] 535. The system of embodiment 534, wherein the site-specific recombinase comprises a nuclear localization signal (e.g., an SV40 nuclear localization signal).
[0994] 536. The system of any of the preceding embodiments, wherein the site-specific recombinase comprises an epitope tag (e.g., an HA tag, e.g., comprising the amino acid sequence YPYDVPDYA (SEQ ID NO: 2504).
[0995] 537. The system of any of the preceding embodiments, where the first DNA construct does not comprise any anellovirus sequences of at least 10, 15, 20, 25, 30, 40, 50, 60, 70, 80, 90, 100, 150, 200, 250, 300, 400, 500, 600, 700, 800, 900, or 1000 nucleotides in length that has greater than 50%, 60%, 70%, 75%, 80%, 85%, 90%, 95%, 96%, 97%, 98%, 99%, or 100% sequence identity to any anellovirus sequence of the same length comprised in the second DNA construct.
[0996] 538. The system of any of the preceding embodiments, wherein the ratio of amount of the first DNA construct to the amount of the second DNA construct is about 1:1:2, 1:1:1.75, 1:1:1.5, 1:1:1.25, 1:1:1, 1:1:0.75, or 1:1:0.5.
[0997] 539. The system of any of the preceding embodiments, wherein the ratio of amount of the first DNA construct to the amount of the second DNA construct is between 1:1:2 to 1:1:1.75, 1:1:1.75 to 1:1:1.5, 1:1:1.5 to 1:1:1.25, 1:1:1.25 to 1:1:1, 1:1:1 to 1:1:0.75, or 1:1:0.75 to 1:1:0.5.
[0998] 540. A host cell comprising the DNA construct or system of any of the preceding embodiments.
[0999] 541. A host cell comprising a particle comprising the Anellovector genetic element of any of the preceding embodiments.
[1000] 542. The host cell of embodiment 540 or 541, wherein the host cell is a mammalian cell, e.g., a human cell (e.g., a HEK293 cell or a HEK293T cell), e.g., a human T cell, e.g., a human ALL T cell, e.g., a MOLT4 cell.
[1001] 543. The host cell of embodiment 540 or 541, wherein the host cell is a bacterial cell, e.g., an E. coli cell.
[1002] 544. The host cell of any of the preceding embodiments, which further comprises the site-specific recombinase that recognizes the first and second recombinase recognition sites.
[1003] 545. The host cell of any of the preceding embodiments, which further comprises a minicircle comprising the Anellovector genetic element sequence of the DNA construct.
[1004] 546. The host cell of any of the preceding embodiments, which further comprises a single stranded Anellovector genetic element comprising a sequence of the Anellovector genetic element sequence of the DNA construct.
[1005] 547. The host cell of embodiment 546, which comprises a particle comprising the single stranded Anellovector genetic element encapsulated by a proteinaceous exterior.
[1006] 548. The host cell of any of the preceding embodiments, which further comprises one or more polypeptide chosen from an ORF1, ORF2, ORF2/2, ORF2/3, ORF1/1, or ORF1/2 molecule.
[1007] 549. A method of excising a double stranded DNA comprising a Anellovector genetic element from a vector backbone, the method comprising:
[1008] contacting the DNA construct of any of the preceding embodiments with the site-specific recombinase under conditions that allow for recombination between the first recombination site and the second recombination site, thereby excising the Anellovector genetic element from the vector backbone.
[1009] 550. A method of providing a first circular double stranded DNA comprising an Anellovector genetic element, the method comprising:
[1010] contacting the DNA construct of any of the preceding embodiments with the site-specific recombinase under conditions that allow for recombination between the first recombination site and the second recombination site,
[1011] thereby providing the first circular DNA comprising the Anellovector genetic element.
[1012] 551. The method of embodiment any of the preceding embodiments, wherein the Anellovector genetic element is one strand of the double stranded DNA sequence.
[1013] 552. The method of any of the preceding embodiments, which produces an Anellovector genetic element comprising a recombinase hybrid site.
[1014] 553. The method of embodiment 552, wherein the recombinase hybrid site has the same sequence as the first or second recombinase recognition site.
[1015] 554. The method of embodiment 552, wherein the recombinase hybrid site has a different sequence from the first and second recombinase recognition sites.
[1016] 555. The method of any of the preceding embodiments, which further produces a circular DNA (e.g., a second circular DNA) comprising the vector backbone and a second recombinase hybrid site.
[1017] 556. The method of embodiment 555, wherein the second recombinase hybrid site has the same sequence as the first or second recombinase recognition site.
[1018] 557. The method of embodiment 555, wherein the second recombinase hybrid site has a different sequence from the first and second recombinase recognition sites.
[1019] 558. The method of embodiment 555, wherein the second recombinase hybrid site has a different sequence from first recombinase hybrid site.
[1020] 559. The method of any of the preceding embodiments, which does not comprise contacting the DNA construct with a ligase.
[1021] 560. The method of any of the preceding embodiments, which results in at least 30%, 40%, 50%, 60%, 70%, 80%, or 90% of DNA sequence comprising the Anellovector genetic element being excised from the vector backbone.
[1022] 561. The method of any of the preceding embodiments, which further comprises introducing the DNA construct into a cell.
[1023] 562. The method of any of the preceding embodiments, which comprises introducing a nucleic acid encoding the site-specific recombinase into the cell (e.g., before, after, or simultaneously with introducing the DNA construct into the cell).
[1024] 563. The method of any of the preceding embodiments, which is performed in a host cell.
[1025] 564. The method of embodiment 563, wherein the host cell is a mammalian cell.
[1026] 565. The method of embodiment 563 or 564, wherein the method further comprises expressing an ORF1 molecule in the cell.
[1027] 566. The method of any of the preceding embodiments, further comprising incubating the cell under conditions suitable for encapsulation of the Anellovector genetic element in a proteinaceous exterior comprising the ORF1 molecule.
[1028] 567. The method of any of the preceding embodiments, wherein the host cell is a bacterial cell
[1029] 568. The method of any of the preceding embodiments, which further comprises isolating the Anellovector genetic element from the cell.
[1030] 569. The method of any of the preceding embodiments, which is performed ex vivo, e.g., in a purified system.
[1031] 570. The method of embodiment 569, which is performed in a cell-free system.
[1032] 571. An Anellovector genetic element produced by the method of any of the preceding embodiments.
[1033] 572. A method of making an Anellovector particle, the method comprising:
[1034] (i) incubating a host cell comprising the DNA construct of any of the preceding embodiments, under conditions suitable for expressing the ORF1 molecule; and
[1035] (ii) incubating the host cell under conditions suitable for encapsulation, within a proteinaceous exterior comprising the ORF1 molecule, of an Anellovector genetic element in the host cell.
[1036] 573. The method of any of the preceding embodiments, wherein the Anellovector genetic element comprises the Anellovector genetic element of any of the preceding embodiments.
[1037] 574. The method of any of the preceding embodiments, wherein the host cell further comprises the Anellovector genetic element construct of any of the preceding embodiments.
[1038] 575. The method of any of the preceding embodiments, wherein the host cell further comprises the first DNA construct of any of the preceding embodiments.
[1039] 576. The method of embodiment 574 or 575,
[1040] wherein the host cell further comprises a site-specific recombinase or a nucleic acid encoding the site-specific recombinase, and
[1041] wherein the method further comprises (e.g., prior to step (ii), prior to steps (i) and (ii), or concurrently with step (i)) incubating the host cell under conditions suitable for recombination of the Anellovector genetic construct of the first DNA construct by the site-specific recombinase.
[1042] 577. A method of making an Anellovector particle, the method comprising:
[1043] contacting the Anellovector genetic element of any of the preceding embodiments with a plurality of ORF1 molecules in vitro (e.g., in a cell-free system) under conditions suitable for encapsulation of the Anellovector genetic element within a proteinaceous exterior comprising the ORF1 molecules; and
[1044] thereby making an Anellovector particle.
[1045] 578. The method of embodiment 577, further comprising, prior to the contacting, isolating the Anellovector genetic element from a host cell (e.g., a host cell comprising the Anellovector genetic element construct or first DNA construct of any of the preceding embodiments).
[1046] 579. The method of embodiment 577, further comprising, prior to the contacting, isolating a double stranded DNA minicircle comprising the sequence of the Anellovector genetic element from a host cell (e.g., a host cell comprising the Anellovector genetic element construct or first DNA construct of any of the preceding embodiments).
[1047] 580. The method of embodiment 579, further comprising, prior to the contacting:
[1048] (i) nicking one strand of the double-stranded DNA minicircle, thereby producing a nicked genetic element construct;
[1049] (ii) incubating the nicked genetic element construct in the presence of an exonuclease under conditions suitable for digestion of the nicked strand of the genetic element construct; and
[1050] (iii) isolating the Anellovector genetic element.
[1051] 581. The method of any of the preceding embodiments, further comprising, prior to the contacting, isolating one or more of the ORF1 molecules from a host cell (e.g., a host cell comprising the DNA construct of any of the preceding embodiments).
[1052] 582. A method of making an Anellovector genetic element, the method comprising:
[1053] (i) providing a double-stranded Anellovector genetic element construct (e.g., the Anellovector genetic element construct of any of the preceding embodiments or the first DNA construct of any of the preceding embodiments);
[1054] (ii) nicking one strand of the double-stranded Anellovector genetic element construct, thereby producing a nicked genetic element construct; and
[1055] (iii) incubating the nicked genetic element construct in the presence of an exonuclease (e.g., T7 exonuclease) under conditions suitable for digestion of the nicked strand of the genetic element construct;
[1056] thereby producing an Anellovector genetic element.
[1057] 583. The method of 582, further comprising isolating the Anellovector genetic element.
[1058] 584. The method of embodiment 582, wherein one strand of the double-stranded Anellovector genetic element construct comprises one or more (e.g., at least 1, 2, 3, 4, 5, 6, 7, 8, 9, or 10) nicking sites.
[1059] 585. The method of embodiment 584, wherein the one or more nicking sites are Nt.BbvCI nicking sites.
[1060] 586. The method of embodiment 584 or 585, wherein the nicking sites are separated by about 10-20, 20-30, 30-40, 40-50, 50-60, 60-70, 70-80, 80-90, 90-100, 100-150, 150-200, 200-250, 250-300, 300-400, 400-500, 500-600, 600-700, 700-800, 800-900, 900-1000, 1000-1500, or 1500-2000 nucleotides.
[1061] 587. The method of embodiment 584 or 585, wherein the nicking sites are separated by at least 10, 20, 30, 40, 50, 60, 70, 80, 90, 100, 200, 300, 400, 500, 600, 700, 800, 900, 1000, 1500, or 2000 nucleotides.
[1062] 588. The Anellovector genetic element, Anellovector genetic element construct, system, host cell, Anellovector particle, preparation, method, DNA construct of any of the preceding embodiments, wherein the exogenous effector comprises a therapeutic agent for treating a disease or disorder of the eye (e.g., macular degeneration or a retinal disease).
[1063] 589. The Anellovector genetic element, Anellovector genetic element construct, system, host cell, Anellovector particle, preparation, method, DNA construct of any of the preceding embodiments, wherein the exogenous effector comprises an intracellular polypeptide or an intracellular nucleic acid.
[1064] 590. The Anellovector genetic element, Anellovector genetic element construct, system, host cell, Anellovector particle, preparation, method, DNA construct of any of the preceding embodiments, wherein the exogenous effector comprises a secreted polypeptide.
[1065] 591. The Anellovector genetic element, Anellovector genetic element construct, system, host cell, Anellovector particle, preparation, method, DNA construct of any of the preceding embodiments, wherein the exogenous effector comprises a polypeptide that, when mutated, causes a human disease, or a functional variant of said polypeptide.
[1066] 592. The Anellovector genetic element, Anellovector genetic element construct, system, host cell, Anellovector particle, preparation, method, DNA construct of any of the preceding embodiments, which comprises an Anellovirus 5′ NCR sequence of Ring 2, Ring 19, Ring 20, Ring 1, or Ring 3 (e.g., as described herein), or a nucleic acid sequence having at least 75%, 80%, 85%, 90%, 95%, 96%, 97%, 98%, or 99% sequence identity thereto.
[1067] 593. The Anellovector genetic element, Anellovector genetic element construct, system, host cell, Anellovector particle, preparation, method, DNA construct of any of the preceding embodiments, which comprises an Anellovirus 3′ NCR sequence of Ring 2, Ring 19, Ring 20, Ring 1, or Ring 3 (e.g., as described herein), or a nucleic acid sequence having at least 75%, 80%, 85%, 90%, 95%, 96%, 97%, 98%, or 99% sequence identity thereto.
[1068] 594. The Anellovector genetic element, Anellovector genetic element construct, system, host cell, Anellovector particle, preparation, method, DNA construct of any of the preceding embodiments, which comprises an Anellovirus NCR sequence of Ring 2, Ring 19, Ring 20, Ring 1, or Ring 3 (e.g., as described herein), or a nucleic acid sequence having at least 75%, 80%, 85%, 90%, 95%, 96%, 97%, 98%, or 99% sequence identity thereto.
[1069] 595. The system, host cell, Anellovector particle, preparation, method, DNA construct of any of the preceding embodiments, wherein the proteinaceous exterior comprises an ORF1 molecule comprising the amino acid sequence of an ORF1 protein of Ring 2, Ring 19, Ring 20, Ring 1, or Ring 3 (e.g., as described herein), or an amino acid sequence having at least 75%, 80%, 85%, 90%, 95%, 96%, 97%, 98%, or 99% sequence identity thereto.
[1070] 596. The Anellovector genetic element, Anellovector genetic element construct, system, host cell, Anellovector particle, preparation, method, DNA construct of any of the preceding embodiments, wherein the Anellovector genetic element comprises a promoter, e.g., upstream of the sequence encoding the exogenous effector.
[1071] 597. The Anellovector genetic element, Anellovector genetic element construct, system, host cell, Anellovector particle, preparation, method, DNA construct of any of the preceding embodiments, wherein the Anellovirus ORF1 molecule does not comprise an Anellovirus ORF1 structural arginine-rich region (e.g., as described herein) or a sequence having at least 75%, 80%, 85%, 90%, 95%, 96%, 97%, 98%, or 99% sequence identity thereto, e.g., a sequence of at least about 40 amino acids comprising at least 60%, 70%, or 80% basic residues (e.g., arginine, lysine, or a combination thereof).
[1072] 598. The Anellovector genetic element, Anellovector genetic element construct, system, host cell, Anellovector particle, preparation, method, DNA construct of any of the preceding embodiments, wherein the Anellovirus ORF1 molecule does not comprise an Anellovirus ORF1 structural C-terminal domain (CTD) (e.g., as described herein) or a sequence having at least 75%, 80%, 85%, 90%, 95%, 96%, 97%, 98%, or 99% sequence identity thereto.
[1073] 599. The Anellovector genetic element, Anellovector genetic element construct, system, host cell, Anellovector particle, preparation, method, DNA construct of any of the preceding embodiments, wherein the Anellovirus ORF1 molecule comprises an Anellovirus ORF1 structural jelly-roll region, e.g., an amino acid sequence having at least 30% (e.g., at least about 30, 35, 40, 50, 60, 70, 80, 90, 95, 96, 97, 98, 99, or 100%) sequence identity to a Anellovirus ORF1 structural jelly-roll region sequence described herein or a sequence comprising at least 6 beta strands.
[1074] 600. The Anellovector genetic element, Anellovector genetic element construct, system, host cell, Anellovector particle, preparation, method, DNA construct of any of the preceding embodiments, wherein the Anellovirus ORF1 molecule comprises an Anellovirus ORF1 structural N22 domain, e.g., an amino acid sequence having at least 30% (e.g., at least about 30, 35, 40, 50, 60, 70, 80, 90, 95, 96, 97, 98, 99, or 100%) sequence identity to an Anellovirus ORF1 structural N22 domain sequence described herein.
[1075] 601. The Anellovector genetic element, Anellovector genetic element construct, system, host cell, Anellovector particle, preparation, method, DNA construct of any of the preceding embodiments, wherein the Anellovirus ORF1 molecule comprises an Anellovirus ORF1 structural C-terminal domain (CTD), e.g., an amino acid sequence having at least 30% (e.g., at least about 30, 35, 40, 50, 60, 70, 80, 90, 95, 96, 97, 98, 99, or 100%) sequence identity to an Anellovirus ORF1 CTD sequence described herein.
[1076] 602. The Anellovector genetic element, Anellovector genetic element construct, system, host cell, Anellovector particle, preparation, method, DNA construct of any of the preceding embodiments, wherein the Anellovirus ORF1 molecule comprises a portion of a structural C-terminal domain (CTD) of an Anellovirus ORF1 molecule, which comprises a deletion of about 20-30, 30-40 (e.g., about 37), 40-50 (e.g., about 55), 50-60, 60-70, 70-80, 80-90, 90-100, 100-110, 110-120, 120-130 (e.g., about 129), 130-140 (e.g., about 131), 140-150 (e.g., about 148), or 150-160 (e.g., about 155) amino acids at the C-terminal end of the structural CTD, relative to a corresponding wild-type structural CTD of the Anellovirus ORF1 molecule.
[1077] 603. A DNA construct comprising:
   [1078] (a) one or both of a sequence encoding an ORF2 molecule, and a sequence encoding an ORF3 molecule; and
   [1079] (b) a sequence having at least 50%, 60%, 70%, 75%, 80%, 85%, 90%, 95%, 96%, 97%, 98%, or 99% identity to a wild-type ORF1 gene (e.g., a gene encoding a wild-type ORF1 molecule), wherein the sequence comprises a first premature stop codon relative to the wild-type ORF1 gene.
[1080] 604. A DNA construct comprising:
   [1081] (a) one or both of a sequence encoding an ORF2 molecule, and a sequence encoding an ORF3 molecule; and
   [1082] (b) a sequence encoding a nonfunctional ORF1 molecule.
[1083] 605. The DNA construct of embodiment 603, wherein the sequence having at least 50%, 60%, 70%, 75%, 80%, 85%, 90%, 95%, 96%, 97%, 98%, or 99% identity to a wild-type ORF1 gene further comprises a second premature stop codon.
[1084] 606. The DNA construct of embodiment 604, wherein the sequence encoding the nonfunctional ORF1 molecule comprises a first premature stop codon.
[1085] 607. The DNA construct of embodiment 606, wherein the sequence encoding the nonfunctional ORF1 molecule further comprises a second premature stop codon.
[1086] 608. The DNA construct of embodiment 607, wherein the first premature stop codon and the second premature stop codon are in immediately adjacent codons.
[1087] 609. The DNA construct of any of embodiments 605-608, wherein the first premature stop codon and/or the second premature stop codon are located within the first 30, 35, 40, 45, 50, 54, 55, 60, or 65 codons of the sequence encoding the nonfunctional ORF1 molecule or the sequence having at least 50%, 60%, 70%, 75%, 80%, 85%, 90%, 95%, 96%, 97%, 98%, or 99% identity to a wild-type ORF1 gene.
[1088] 610. The DNA construct of any of embodiments 603-609, wherein the sequence encoding the ORF2 molecule and the sequence encoding the ORF1 molecule overlap.
[1089] 611. The DNA construct of any of embodiments 603-610, wherein the sequence encoding the ORF3 molecule and the sequence encoding the ORF1 molecule overlap.
[1090] 612. The DNA construct of any of embodiments 603-611, which does not produce a detectable amount of full-length ORF1 molecules.
[1091] 613. The DNA construct of any of embodiments 603-612, which produces an amount of an ORF2 molecule that is no less than 90%, 95%, 96%, 97%, 98%, or 99% the amount of ORF2 molecule produced by an otherwise identical DNA construct that lacks the premature stop codons.
[1092] 614. The DNA construct of any of embodiments 603-613, which produces an amount of an ORF3 molecule that is no less than 90%, 95%, 96%, 97%, 98%, or 99% the amount of ORF3 molecule produced by an otherwise identical DNA construct that lacks the premature stop codons.
[1093] 615. The DNA construct of any of embodiments 603-614, which produces an amount of an ORF1/1 molecule that is no less than 90%, 95%, 96%, 97%, 98%, or 99% the amount of ORF1/1 molecule produced by an otherwise identical DNA construct that lacks the premature stop codons.
[1094] 616. The DNA construct of any of embodiments 603-615, wherein the DNA construct comprises a sequence encoding a replication protein (e.g., a large T antigen, or a functional fragment, mutant, or variant thereof).
[1095] 617. The DNA construct of any of embodiments 603-616, wherein the DNA construct comprises an exogenous origin (e.g., an exogenous viral origin, e.g., an SV40, PCV, or AAV origin).
[1096] 618. The DNA construct of any of embodiments 603 and 605-617, wherein the wild-type ORF1 gene is a Ring2 ORF1 gene or a Ring19 ORF1 gene.
[1097] 619. The DNA construct of any of embodiments 603-618, wherein the ORF2 molecule comprises the amino acid sequence of a Ring2 ORF2 protein or a Ring19 ORF2 protein, or an amino acid sequence having at least 75%, 80%, 85%, 90%, 95%, 96%, 97%, 98%, or 99% identity thereto.
[1098] 620. The DNA construct of any of embodiments 603-619, wherein the ORF3 molecule comprises the amino acid sequence of a Ring2 ORF3 protein or a Ring19 ORF3 protein, or an amino acid sequence having at least 75%, 80%, 85%, 90%, 95%, 96%, 97%, 98%, or 99% identity thereto.
[1099] 621. A system comprising:
   [1100] (i) the DNA construct of any of embodiments 603-620; and
   [1101] (ii) a DNA construct comprising a sequence encoding an ORF1 molecule.
[1102] 622. A method of producing an anellovector, the method comprising:
[1103] (I) providing a cell comprising:
   [1104] (a) the system of embodiment 621;
   [1105] (b) a genetic element construct comprising:
      [1106] (i) a first recombinase recognition site (e.g., a loxP site);
      [1107] (ii) an Anellovector genetic element sequence comprising a sequence encoding an exogenous effector; and
      [1108] (iii) a second recombinase recognition site (e.g., a loxP site) in the same orientation as the first recombinase recognition site;
   [1109] (c) a construct comprising a sequence encoding a site-specific recombinase;
[1110] (II) incubating the cell under conditions suitable for production of an anellovector; thereby producing the anellovector.
[1111] 623. The method of embodiment 622, wherein the conditions suitable for production of an anellovector comprise:
   [1112] (i) conditions suitable for expression of the ORF1 molecule;
   [1113] (ii) conditions suitable for expression of the ORF2 and/or ORF3 molecule;
   [1114] (iii) conditions suitable for expression of the site-specific recombinase;
   [1115] (iv) conditions suitable for excision of the Anellovector genetic element sequence from the genetic element construct; and/or
   [1116] (v) conditions suitable for encapsulation of an Anellovector genetic element within a proteinaceous exterior comprising the ORF1 molecule.
[1117] 624. The method of any of embodiments 622-623, further comprising introducing the system of embodiment M1 into the cell.
[1118] 625. The method of any of embodiments 622-624, further comprising introducing the genetic element construct into the cell.
[1119] 626. The method of any of embodiments 622-625, further comprising introducing the construct comprising the sequence encoding the site-specific recombinase into the cell.
[1120] 627. The method of any of embodiments 622-626, wherein the anellovector comprises a genetic element and a proteinaceous exterior encapsulating the genetic element.
[1121] 628. The method of embodiment 627, wherein the genetic element is a DNase-protected genetic element.
[1122] 629. A DNA construct comprising one or more of (e.g., 1, 2, or all 3 of): a sequence encoding an ORF1 molecule, a sequence encoding an ORF2 molecule, and a sequence encoding an ORF3 molecule; and
[1123] wherein the DNA construct does not comprise an Anellovirus non-coding region (NCR) sequence, or a portion thereof comprising the sequence of 10-20, 20-30, 30-40 40-50, 50-60, 60-70, 70-80, 80-90, 90-100, 100-125, 125-150, 150-160, 160-70, 170-200, 200-225, 225-250, 250-275, 275-300, 300-350, or 350-400 contiguous nucleotides therefrom.
[1124] 630. The DNA construct of embodiment 629, wherein the first intron of the Anellovirus NCR is absent.
[1125] 631. The DNA construct of any of embodiments 629-630, which comprises the first exon of the Anellovirus NCR.
[1126] 632. The DNA construct of any of embodiments 629-630, wherein the DNA construct comprises the Kozak sequence and excludes the remaining portion of the first exon of the Anellovirus NCR.
[1127] 633. The DNA construct of any of embodiments 629-632, wherein nucleotides 1682-1769 of SEQ ID NO: 2000 are absent.
[1128] 634. The DNA construct of any of embodiments 629-633, which does not comprise any contiguous sequence of nucleotides having more than 50%, 60%, 70%, 75%, 80%, 85%, 90%, 95%, 96%, 97%, 98%, 99%, or 100% sequence identity to a first intron of the Anellovirus NCR, e.g., Intron 1 of pRTx-3525, e.g., nucleotides 1682-1769 of SEQ ID NO: 2000.
[1129] 635. The DNA construct of any of embodiments 629-634, wherein nucleotides 1625-1675 of SEQ ID NO: 2000 are absent.
[1130] 636. The DNA construct of any of embodiments 629-635, which does not comprise any contiguous sequence of nucleotides having more than 50%, 60%, 70%, 75%, 80%, 85%, 90%, 95%, 96%, 97%, 98%, 99%, or 100% sequence identity to a portion of a first exon of the Anellovirus NCR (e.g., Exon 1 of pRTx-3525, e.g., nucleotides 1625-1675 of the SEQ ID NO: 2000), optionally wherein the DNA construct comprises a Kozak sequence and excludes the remaining portion of the first exon.
[1131] 637 The DNA construct of embodiment 636, which does not comprise any contiguous sequence of nucleotides having more than 50%, 60%, 70%, 75%, 80%, 85%, 90%, 95%, 96%, 97%, 98%, 99%, or 100% sequence identity to nucleotides 1625-1675 of SEQ ID NO: 2000.
[1132] 638. The DNA construct of any of embodiments 629-637, which comprises a nucleic acid sequence having at least 50%, 60%, 70%, 75%, 80%, 85%, 90%, 95%, 96%, 97%, 98%, 99%, or 100% sequence identity to a portion of a first exon of the Anellovirus NCR (e.g., Exon 1 of pRTx-3525, e.g., nucleotides 1625-1681 of the SEQ ID NO: 2000).
[1133] 639. The DNA construct of embodiment 638, which comprises a nucleic acid sequence having at least 50%, 60%, 70%, 75%, 80%, 85%, 90%, 95%, 96%, 97%, 98%, 99%, or 100% sequence identity to nucleotides 1625-1675 of SEQ ID NO: 2000.
[1134] 640. The DNA construct of any of embodiments 629-639, which does not comprise:
   [1135] (i) any contiguous sequence of nucleotides having more than 50%, 60%, 70%, 75%, 80%, 85%, 90%, 95%, 96%, 97%, 98%, 99%, or 100% sequence identity to a first intron of the Anellovirus NCR, e.g., Intron 1 of pRTx-3525, e.g., nucleotides 1682-1769 of SEQ ID NO: 2000; and
   [1136] (ii) any contiguous sequence of nucleotides having more than 50%, 60%, 70%, 75%, 80%, 85%, 90%, 95%, 96%, 97%, 98%, 99%, or 100% sequence identity to nucleotides 1625-1675 of SEQ ID NO: 2000.
[1137] 641 The DNA construct of any of embodiments 629-640, wherein nucleotides 1682-1769 and 1625-1675 of SEQ ID NO: 2000 are absent.
[1138] 642. The DNA construct of any of embodiments 629-641, which:
   [1139] (i) does not comprise any contiguous sequence of nucleotides having more than 50%, 60%, 70%, 75%, 80%, 85%, 90%, 95%, 96%, 97%, 98%, 99%, or 100% sequence identity to a first intron of the Anellovirus NCR, e.g., Intron 1 of pRTx-3525, e.g., nucleotides 1682-1769 of SEQ ID NO: 2000; and
   [1140] (ii) comprises a contiguous sequence of nucleotides having at least 50%, 60%, 70%, 75%, 80%, 85%, 90%, 95%, 96%, 97%, 98%, 99%, or 100% sequence identity to nucleotides 1625-1675 of SEQ ID NO: 2000.
[1141] 643. The DNA construct of any of embodiments 629-642, which comprises nucleotides 1625-1675 of SEQ ID NO: 2000, and which does not comprise nucleotides 1682-1769 of SEQ ID NO: 2000.
[1142] 644. The DNA construct of any of embodiments 629-643, which comprises a Kozak sequence, e.g., a Kozak sequence native to the NCR (e.g., a Kozak sequence having at least 75%, 80%, 85%, 90%, 95%, 96%, 97%, 98%, 99%, or 100% sequence identity to nucleotides 1676-1681 of SEQ ID NO: 2000).
[1143] 645. A DNA construct comprising:
   [1144] (a) one or more of (e.g., 1, 2, or all 3 of): a sequence encoding an ORF1 molecule, a sequence encoding an ORF2 molecule, and a sequence encoding an ORF3 molecule; and
   [1145] (b) a T cell promoter operably linked to one or more (e.g., 1, 2, or all 3 of) sequences of (a).
[1146] 646. The DNA construct of embodiment 645, wherein the T cell promoter is selected from the group consisting of an MNDU3, SFFV, MSCV, Distal Lck (dLck), CD3δ, EF1a, RPBSA, and Cbh promoter.
[1147] 647. The DNA construct of embodiment 645, wherein the T cell promoter is an MNDU3 promoter.
[1148] 648. The DNA construct of embodiment 647, wherein the MNDU3 promoter comprises at least 75%, 80%, 85%, 90%, 95%, 96%, 97%, 98%, 99%, or 100% sequence identity to the nucleic acid sequence of SEQ ID NO: 2784.
[1149] 649. The DNA construct of embodiment 645, wherein the T cell promoter is a SFFV promoter.
[1150] 650. The DNA construct of embodiment 649, wherein the SFFV promoter comprises at least 75%, 80%, 85%, 90%, 95%, 96%, 97%, 98%, 99%, or 100% sequence identity to the nucleic acid sequence of SEQ ID NO: 2786.
[1151] 651. The DNA construct of embodiment 645, wherein the T cell promoter is a MSCV promoter.
[1152] 652. The DNA construct of embodiment 651, wherein the MSCV promoter comprises at least 75%, 80%, 85%, 90%, 95%, 96%, 97%, 98%, 99%, or 100% sequence identity to the nucleic acid sequence of SEQ ID NO: 2785.
[1153] 653. The DNA construct of any of embodiments 645-652, wherein the DNA construct comprises a sequence encoding a replication protein (e.g., a large T antigen, or a functional fragment, mutant, or variant thereof).
[1154] 654. The DNA construct of any of embodiments 645-653, wherein the DNA construct comprises an exogenous origin (e.g., an exogenous viral origin, e.g., an SV40, PCV, or AAV origin).
[1155] 655. The DNA construct of any of embodiments 645-654, wherein the ORF1 molecule comprises the amino acid sequence of a Ring2 ORF1 protein or a Ring19 ORF1 protein, or an amino acid sequence having at least 75%, 80%, 85%, 90%, 95%, 96%, 97%, 98%, or 99% identity thereto.
[1156] 656. The DNA construct of any of embodiments 645-655, wherein the ORF2 molecule comprises the amino acid sequence of a Ring2 ORF2 protein or a Ring19 ORF2 protein, or an amino acid sequence having at least 75%, 80%, 85%, 90%, 95%, 96%, 97%, 98%, or 99% identity thereto.
[1157] 657. The DNA construct of any of embodiments 645-656, wherein the ORF3 molecule comprises the amino acid sequence of a Ring2 ORF3 protein or a Ring19 ORF3 protein, or an amino acid sequence having at least 75%, 80%, 85%, 90%, 95%, 96%, 97%, 98%, or 99% identity thereto.
[1158] 658. A system comprising:
   [1159] (i) the DNA construct of any of embodiments 645-657; and
   [1160] (ii) a DNA construct comprising a sequence encoding an ORF1 molecule.
[1161] 659. A method of producing an anellovector, the method comprising:
[1162] (I) providing a cell comprising:
   [1163] (a) the system of embodiment 658;
   [1164] (b) a genetic element construct comprising:
      [1165] (i) a first recombinase recognition site (e.g., a loxP site);
      [1166] (ii) an Anellovector genetic element sequence comprising a sequence encoding an exogenous effector; and
      [1167] (iii) a second recombinase recognition site (e.g., a loxP site) in the same orientation as the first recombinase recognition site;
   [1168] (c) a construct comprising a sequence encoding a site-specific recombinase;
[1169] (II) incubating the cell under conditions suitable for production of an anellovector;
[1170] thereby producing the anellovector.
[1171] 660. The method of embodiment 659, wherein the anellovector comprises a genetic element and a proteinaceous exterior encapsulating the genetic element.
[1172] 661. The method of embodiment 660, wherein the genetic element is a DNase-protected genetic element.
[1173] 662. An anellovector comprising:
[1174] (i) a proteinaceous exterior comprising an ORF1 molecule, wherein the ORF1 molecule has a higher level of amino acid sequence similarity to the sequence of an ORF1 molecule encoded by a first Anellovirus genomic sequence than to an ORF1 molecule encoded by a second Anellovirus genomic sequence, and
[1175] (ii) a genetic element enclosed by the proteinaceous exterior, wherein the genetic element comprises:
[1176] a nucleic acid sequence encoding an exogenous effector; and
[1177] one or both of:
[1178] (a) an Anellovirus GC-rich region, wherein the Anellovirus GC-rich region has a higher level of sequence similarity to the Anellovirus GC-rich region of the second Anellovirus genomic sequence than to the Anellovirus GC-rich region of the first Anellovirus genomic sequence; and
[1179] (b) an Anellovirus 5′ UTR conserved domain, wherein the Anellovirus 5′ UTR conserved domain has a higher level of sequence similarity to the Anellovirus 5′ UTR conserved domain of the second Anellovirus genomic sequence than to the Anellovirus 5′ UTR conserved domain of the first Anellovirus genomic sequence.
[1180] 663. An anellovector comprising:
[1181] (i) a proteinaceous exterior comprising an ORF1 molecule, having an ORF1 sequence of a first Anellovirus genomic sequence, or a polypeptide comprising an amino acid sequence having at least about 70%, 75%, 80%, 85%, 90%, 95%, 96%, 97%, 98%, or 99% sequence identity thereto; and
[1182] (ii) a genetic element enclosed by the proteinaceous exterior, wherein the genetic element comprises:
[1183] a nucleic acid sequence encoding an exogenous effector; and
[1184] one or both of:
[1185] (a) an Anellovirus GC-rich region, having the sequence of an Anellovirus GC-rich region of a second Anellovirus genomic sequence, or a nucleic acid comprising a nucleotide sequence having at least about 85%, 90%, 95%, 96%, 97%, 98%, or 99% sequence identity thereto,
[1186] wherein the Anellovirus GC-rich region has a higher level of sequence similarity to the Anellovirus GC-rich region of the second Anellovirus genomic sequence than to the Anellovirus GC-rich region of the first Anellovirus genomic sequence; and
[1187] (b) an Anellovirus 5′ UTR conserved domain, having the sequence of an Anellovirus 5′ UTR conserved domain of the second Anellovirus genomic sequence, or a nucleic acid comprising a nucleotide sequence having at least about 91%, 92%, 93%, 94%, 95%, 96%, 97%, 98%, or 99% sequence identity thereto,
[1188] wherein the Anellovirus 5′ UTR conserved domain has a higher level of sequence similarity to the Anellovirus 5′ UTR conserved domain of the second Anellovirus genomic sequence than to the Anellovirus 5′ UTR conserved domain of the first Anellovirus genomic sequence.
[1189] 664. An anellovector comprising:
[1190] (i) a proteinaceous exterior comprising an ORF1 molecule derived from a first Anellovirus genomic sequence, and
[1191] (ii) a genetic element enclosed by the proteinaceous exterior, wherein the genetic element comprises:
[1192] a promoter element operably linked to a nucleic acid sequence encoding an exogenous effector; and
[1193] one or both of:
[1194] (a) an Anellovirus GC-rich region derived from a second Anellovirus genomic sequence, and
[1195] (b) an Anellovirus 5′ UTR conserved domain derived from the second Anellovirus genomic sequence.
[1196] 665. The anellovector of any of the preceding embodiments, wherein the first Anellovirus genomic sequence is the genomic sequence of a Betatorquevirus.
[1197] 666. The anellovector of any of the preceding embodiments, wherein the second Anellovirus genomic sequence is the genomic sequence of a Betatorquevirus.
[1198] 667. The anellovector of any of the preceding embodiments, wherein the first Anellovirus genomic sequence is the genomic sequence of an Alphatorquevirus.
[1199] 668. The anellovector of any of the preceding embodiments, wherein the second Anellovirus genomic sequence is the genomic sequence of an Alphatorquevirus.
[1200] 669. The anellovector of any of the preceding embodiments, wherein the first Anellovirus genomic sequence is the genomic sequence of a Gammatorquevirus.
[1201] 670. The anellovector of any of the preceding embodiments, wherein the second Anellovirus genomic sequence is the genomic sequence of a Gammatorquevirus.
[1202] 671. The anellovector of any of embodiments 662-666, 668, or 670, wherein the first Anellovirus genomic sequence is a Ring19 Anellovirus having a genome sequence of SEQ ID NO: 1.
[1203] 672. The anellovector of any of embodiments 662-666, 668, or 670, wherein the first Anellovirus genomic sequence is a Ring2 Anellovirus having a genome sequence of SEQ ID NO: 54.
[1204] 673. The anellovector of any of embodiments 662-666, 668, or 670, wherein the first Anellovirus genomic sequence is a Ring9 Anellovirus having a genome sequence of SEQ ID NO: 1001.
[1205] 674. The anellovector of any of embodiments 662-666, 668, or 670, wherein the first Anellovirus genomic sequence is a Ring25 Anellovirus having a genome sequence of SEQ ID NO: 210.
[1206] 675. The anellovector of any of embodiments 662-666, 668, or 670, wherein the first Anellovirus genomic sequence is a Ring34 Anellovirus having a genome sequence of SEQ ID NO: 207.
[1207] 676. The anellovector of any of embodiments 662-666, 668, or 670, wherein the first Anellovirus genomic sequence is a Ring161 Anellovirus having a genome sequence of SEQ ID NO: 204.
[1208] 677. The anellovector of any of embodiments 662-666, 668, or 670, wherein the first Anellovirus genomic sequence is a YYBYFW Anellovirus having a genome sequence of SEQ ID NO: 200.
[1209] 678. The anellovector of any of embodiments 662-666, 668, or 670, wherein the first Anellovirus genomic sequence is a Ring10 Anellovirus having a genome sequence of SEQ ID NO: 1008.
[1210] 679. The anellovector of any of embodiments 662-666, 667, 669, 671, or 673-678, wherein the second Anellovirus genomic sequence is a Ring2 Anellovirus having a genome sequence of SEQ ID NO: 54.
[1211] 680. The anellovector of any of embodiments 662-666, 667, 669, or 672-678, wherein the second Anellovirus genomic sequence is a Ring19 Anellovirus having a genome sequence of SEQ ID NO: 1.
[1212] 681. The anellovector of any of embodiments 662-666, 667, 669, 671, 672, or 674-678, wherein the second Anellovirus genomic sequence is a Ring9 Anellovirus having a genome sequence of SEQ ID NO: 1001.
[1213] 682. The anellovector of any of embodiments 662-666, 667, 669, 671-673, or 675-678, wherein the second Anellovirus genomic sequence is a Ring25 Anellovirus having a genome sequence of SEQ ID NO: 210.
[1214] 683. The anellovector of any of embodiments 662-666, 667, 669, 671-674, or 676-678, wherein the second Anellovirus genomic sequence is a Ring34 Anellovirus having a genome sequence of SEQ ID NO: 207.
[1215] 684. The anellovector of any of embodiments 662-666, 667, 669, 671-675, or 677-678, wherein the second Anellovirus genomic sequence is a Ring161 Anellovirus having a genome sequence of SEQ ID NO: 204.
[1216] 685. The anellovector of any of embodiments 662-666, 667, 669, 671-676, or 678, wherein the second Anellovirus genomic sequence is a YYBYFW Anellovirus having a genome sequence of SEQ ID NO: 200.
[1217] 686. The anellovector of any of embodiments 662-666, 667, 669, or 671-677, wherein the second Anellovirus genomic sequence is a Ring10 Anellovirus having a genome sequence of SEQ ID NO: 1008.
[1218] 687. The anellovector of any of embodiments 662-666, wherein the second Anellovirus genomic sequence is a Ring19 Anellovirus having a genome sequence of SEQ ID NO: 1 and:
[1219] a) the first Anellovirus genomic sequence is a Ring2 Anellovirus having a genome sequence of SEQ ID NO: 54;
[1220] b) the first Anellovirus genomic sequence is a Ring9 Anellovirus having a genome sequence of SEQ ID NO: 1001;
[1221] c) the first Anellovirus genomic sequence is a Ring25 Anellovirus having a genome sequence of SEQ ID NO: 210;
[1222] d) the first Anellovirus genomic sequence is a Ring34 Anellovirus having a genome sequence of SEQ ID NO: 207;
[1223] e) the first Anellovirus genomic sequence is a Ring161 Anellovirus having a genome sequence of SEQ ID NO: 204;
[1224] f) the first Anellovirus genomic sequence is a YYBYFW Anellovirus having a genome sequence of SEQ ID NO: 200; or
[1225] g) the first Anellovirus genomic sequence is a Ring10 Anellovirus having a genome sequence of SEQ ID NO: 1008.
[1226] 688. The anellovector of any of embodiments 662-666, 668, or 670, wherein the ORF1 molecule has a sequence according to any of Tables A1-A32, or a polypeptide comprising an amino acid sequence having at least about 70%, 75%, 80%, 85%, 90%, 95%, 96%, 97%, 98%, or 99% sequence identity thereto.
[1227] 689. The anellovector of any of embodiments 662-666, 667, or 669, wherein the Anellovirus GC-rich region has a sequence of the reverse complement of the GC-rich region of any of Tables N1-N32, or functional fragment thereof, or a nucleic acid sequence having at least about 70%, 75%, 80%, 85%, 90%, 95%, 96%, 97%, 98%, or 99% sequence identity thereto.
[1228] 690. The anellovector of any of embodiments 662-666, wherein:
[1229] a) the ORF1 molecule has a sequence according to SEQ ID NO: 58, or a polypeptide comprising an amino acid sequence having at least about 70%, 75%, 80%, 85%, 90%, 95%, 96%, 97%, 98%, or 99% sequence identity thereto, and the Anellovirus GC-rich region has a sequence of the reverse complement of the Anellovirus GC-rich region of SEQ ID NO: 1, or a nucleic acid sequence having at least about 70%, 75%, 80%, 85%, 90%, 95%, 96%, 97%, 98%, or 99% sequence identity thereto;
[1230] b) the ORF1 molecule has a sequence according to SEQ ID NO: 1005, or a polypeptide comprising an amino acid sequence having at least about 70%, 75%, 80%, 85%, 90%, 95%, 96%, 97%, 98%, or 99% sequence identity thereto, and the Anellovirus GC-rich region has a sequence of the reverse complement of the Anellovirus GC-rich region of SEQ ID NO: 1, or a nucleic acid sequence having at least about 70%, 75%, 80%, 85%, 90%, 95%, 96%, 97%, 98%, or 99% sequence identity thereto;
[1231] c) the ORF1 molecule has a sequence according to SEQ ID NO: 211, or a polypeptide comprising an amino acid sequence having at least about 70%, 75%, 80%, 85%, 90%, 95%, 96%, 97%, 98%, or 99% sequence identity thereto, and the Anellovirus GC-rich region has a sequence of the reverse complement of the Anellovirus GC-rich region of SEQ ID NO: 1, or a nucleic acid sequence having at least about 70%, 75%, 80%, 85%, 90%, 95%, 96%, 97%, 98%, or 99% sequence identity thereto;
[1232] d) the ORF1 molecule has a sequence according to SEQ ID NO: 208, or a polypeptide comprising an amino acid sequence having at least about 70%, 75%, 80%, 85%, 90%, 95%, 96%, 97%, 98%, or 99% sequence identity thereto, and the Anellovirus GC-rich region has a sequence of the reverse complement of the Anellovirus GC-rich region of SEQ ID NO: 1, or a nucleic acid sequence having at least about 70%, 75%, 80%, 85%, 90%, 95%, 96%, 97%, 98%, or 99% sequence identity thereto;
[1233] e) the ORF1 molecule has a sequence according to SEQ ID NO: 205, or a polypeptide comprising an amino acid sequence having at least about 70%, 75%, 80%, 85%, 90%, 95%, 96%, 97%, 98%, or 99% sequence identity thereto, and the Anellovirus GC-rich region has a sequence of the reverse complement of the Anellovirus GC-rich region of SEQ ID NO: 1, or a nucleic acid sequence having at least about 70%, 75%, 80%, 85%, 90%, 95%, 96%, 97%, 98%, or 99% sequence identity thereto;
[1234] f) the ORF1 molecule has a sequence according to SEQ ID NO: 201, or a polypeptide comprising an amino acid sequence having at least about 70%, 75%, 80%, 85%, 90%, 95%, 96%, 97%, 98%, or 99% sequence identity thereto, and the Anellovirus GC-rich region has a sequence of the reverse complement of the Anellovirus GC-rich region of SEQ ID NO: 1, or a nucleic acid sequence having at least about 70%, 75%, 80%, 85%, 90%, 95%, 96%, 97%, 98%, or 99% sequence identity thereto; or
[1235] g) the ORF1 molecule has a sequence according to SEQ ID NO: 1012, or a polypeptide comprising an amino acid sequence having at least about 70%, 75%, 80%, 85%, 90%, 95%, 96%, 97%, 98%, or 99% sequence identity thereto, and the Anellovirus GC-rich region has a sequence of the reverse complement of the Anellovirus GC-rich region of SEQ ID NO: 1, or a nucleic acid sequence having at least about 70%, 75%, 80%, 85%, 90%, 95%, 96%, 97%, 98%, or 99% sequence identity thereto.
[1236] 691. An anellovector comprising:
[1237] (i) a proteinaceous exterior comprising an ORF1 molecule having a sequence according to SEQ ID NO: 58, or a polypeptide comprising an amino acid sequence having at least about 70%, 75%, 80%, 85%, 90%, 95%, 96%, 97%, 98%, or 99% sequence identity thereto, and
[1238] (ii) a genetic element enclosed by the proteinaceous exterior, wherein the genetic element comprises:
[1239] a nucleic acid sequence encoding an exogenous effector; and
[1240] one or both of:
   [1241] (a) an Anellovirus GC-rich region, wherein the Anellovirus GC-rich region has a sequence of the reverse complement of the Anellovirus GC-rich region of SEQ ID NO: 1, or a nucleic acid sequence having at least about 90%, 95%, 96%, 97%, 98%, or 99% sequence identity thereto; and
   [1242] (b) an Anellovirus 5′ UTR conserved domain, wherein the Anellovirus 5′ UTR conserved domain has a sequence of the reverse complement of the Anellovirus 5′ UTR conserved domain of SEQ ID NO: 1, or a nucleic acid sequence having at least about 90%, 95%, 96%, 97%, 98%, or 99% sequence identity thereto.
[1243] 692. An anellovector comprising:
[1244] (i) a proteinaceous exterior comprising an ORF1 molecule having a sequence according to SEQ ID NO: 1005, or a polypeptide comprising an amino acid sequence having at least about 70%, 75%, 80%, 85%, 90%, 95%, 96%, 97%, 98%, or 99% sequence identity thereto, and
[1245] (ii) a genetic element enclosed by the proteinaceous exterior, wherein the genetic element comprises:
[1246] a nucleic acid sequence encoding an exogenous effector; and
[1247] one or both of:
   [1248] (a) an Anellovirus GC-rich region, wherein the Anellovirus GC-rich region has a sequence of the reverse complement of the Anellovirus GC-rich region of SEQ ID NO: 1, or a nucleic acid sequence having at least about 90%, 95%, 96%, 97%, 98%, or 99% sequence identity thereto; and
   [1249] (b) an Anellovirus 5′ UTR conserved domain, wherein the Anellovirus 5′ UTR conserved domain has a sequence of the reverse complement of the Anellovirus 5′ UTR conserved domain of SEQ ID NO: 1, or a nucleic acid sequence having at least about 90%, 95%, 96%, 97%, 98%, or 99% sequence identity thereto.
[1250] 693. An anellovector comprising:
[1251] (i) a proteinaceous exterior comprising an ORF1 molecule having a sequence according to SEQ ID NO: 211, or a polypeptide comprising an amino acid sequence having at least about 70%, 75%, 80%, 85%, 90%, 95%, 96%, 97%, 98%, or 99% sequence identity thereto, and
[1252] (ii) a genetic element enclosed by the proteinaceous exterior, wherein the genetic element comprises:
[1253] a nucleic acid sequence encoding an exogenous effector; and
[1254] one or both of:
   [1255] (a) an Anellovirus GC-rich region, wherein the Anellovirus GC-rich region has a sequence of the reverse complement of the Anellovirus GC-rich region of SEQ ID NO: 1, or a nucleic acid sequence having at least about 90%, 95%, 96%, 97%, 98%, or 99% sequence identity thereto; and
   [1256] (b) an Anellovirus 5′ UTR conserved domain, wherein the Anellovirus 5′ UTR conserved domain has a sequence of the reverse complement of the Anellovirus 5′ UTR conserved domain of SEQ ID NO: 1, or a nucleic acid sequence having at least about 90%, 95%, 96%, 97%, 98%, or 99% sequence identity thereto.
[1257] 694. An anellovector comprising:
[1258] (i) a proteinaceous exterior comprising an ORF1 molecule having a sequence according to SEQ ID NO: 208, or a polypeptide comprising an amino acid sequence having at least about 70%, 75%, 80%, 85%, 90%, 95%, 96%, 97%, 98%, or 99% sequence identity thereto, and
[1259] (ii) a genetic element enclosed by the proteinaceous exterior, wherein the genetic element comprises:
[1260] a nucleic acid sequence encoding an exogenous effector; and
[1261] one or both of:
   [1262] (a) an Anellovirus GC-rich region, wherein the Anellovirus GC-rich region has a sequence of the reverse complement of the Anellovirus GC-rich region of SEQ ID NO: 1, or a nucleic acid sequence having at least about 90%, 95%, 96%, 97%, 98%, or 99% sequence identity thereto; and
   [1263] (b) an Anellovirus 5′ UTR conserved domain, wherein the Anellovirus 5′ UTR conserved domain has a sequence of the reverse complement of the Anellovirus 5′ UTR conserved domain of SEQ ID NO: 1, or a nucleic acid sequence having at least about 90%, 95%, 96%, 97%, 98%, or 99% sequence identity thereto.
[1264] 695. An anellovector comprising:
[1265] (i) a proteinaceous exterior comprising an ORF1 molecule having a sequence according to SEQ ID NO: 205, or a polypeptide comprising an amino acid sequence having at least about 70%, 75%, 80%, 85%, 90%, 95%, 96%, 97%, 98%, or 99% sequence identity thereto, and
[1266] (ii) a genetic element enclosed by the proteinaceous exterior, wherein the genetic element comprises:
[1267] a nucleic acid sequence encoding an exogenous effector; and
[1268] one or both of:
   [1269] (a) an Anellovirus GC-rich region, wherein the Anellovirus GC-rich region has a sequence of the reverse complement of the Anellovirus GC-rich region of SEQ ID NO: 1, or a nucleic acid sequence having at least about 90%, 95%, 96%, 97%, 98%, or 99% sequence identity thereto; and
   [1270] (b) an Anellovirus 5′ UTR conserved domain, wherein the Anellovirus 5′ UTR conserved domain has a sequence of the reverse complement of the Anellovirus 5′ UTR conserved domain of SEQ ID NO: 1, or a nucleic acid sequence having at least about 90%, 95%, 96%, 97%, 98%, or 99% sequence identity thereto.
[1271] 696. An anellovector comprising:
[1272] (i) a proteinaceous exterior comprising an ORF1 molecule having a sequence according to SEQ ID NO: 201, or a polypeptide comprising an amino acid sequence having at least about 70%, 75%, 80%, 85%, 90%, 95%, 96%, 97%, 98%, or 99% sequence identity thereto, and
[1273] (ii) a genetic element enclosed by the proteinaceous exterior, wherein the genetic element comprises:
[1274] a nucleic acid sequence encoding an exogenous effector; and
[1275] one or both of:
   [1276] (a) an Anellovirus GC-rich region, wherein the Anellovirus GC-rich region has a sequence of the reverse complement of the Anellovirus GC-rich region of SEQ ID NO: 1, or a nucleic acid sequence having at least about 90%, 95%, 96%, 97%, 98%, or 99% sequence identity thereto; and
   [1277] (b) an Anellovirus 5′ UTR conserved domain, wherein the Anellovirus 5′ UTR conserved domain has a sequence of the reverse complement of the Anellovirus 5′ UTR conserved domain of SEQ ID NO: 1, or a nucleic acid sequence having at least about 90%, 95%, 96%, 97%, 98%, or 99% sequence identity thereto.
[1278] 697. An anellovector comprising:
[1279] (i) a proteinaceous exterior comprising an ORF1 molecule having a sequence according to SEQ ID NO: 1012, or a polypeptide comprising an amino acid sequence having at least about 70%, 75%, 80%, 85%, 90%, 95%, 96%, 97%, 98%, or 99% sequence identity thereto, and
[1280] (ii) a genetic element enclosed by the proteinaceous exterior, wherein the genetic element comprises:
[1281] a nucleic acid sequence encoding an exogenous effector; and
[1282] one or both of:
   [1283] (a) an Anellovirus GC-rich region, wherein the Anellovirus GC-rich region has a sequence of the reverse complement of the Anellovirus GC-rich region of SEQ ID NO: 1, or a nucleic acid sequence having at least about 90%, 95%, 96%, 97%, 98%, or 99% sequence identity thereto; and
   [1284] (b) an Anellovirus 5′ UTR conserved domain, wherein the Anellovirus 5′ UTR conserved domain has a sequence of the reverse complement of the Anellovirus 5′ UTR conserved domain of SEQ ID NO: 1, or a nucleic acid sequence having at least about 90%, 95%, 96%, 97%, 98%, or 99% sequence identity thereto.
[1285] 698. The anellovector of any of the preceding embodiments, wherein the genetic element lacks an Anellovirus CG-rich region of the first Anellovirus genomic sequence.
[1286] 699. The anellovector of any of the preceding embodiments, which lacks an ORF1 molecule of the second Anellovirus genomic sequence.
[1287] 700. The anellovector of any of the preceding embodiments, wherein the genetic element comprises an Anellovirus 5′ UTR conserved domain, e.g., wherein the Anellovirus 5′ UTR conserved domain has a sequence of the reverse complement of the 5′ UTR Conserved Domain of any of Tables N1-N32, or a nucleic acid sequence having at least about 70%, 75%, 80%, 85%, 90%, 95%, 96%, 97%, 98%, or 99% sequence identity thereto.
[1288] 701. The anellovector of any of the preceding embodiments, wherein the genetic element comprises an Anellovirus non-coding region (NCR), e.g., wherein the Anellovirus NCR has a sequence of the reverse complement of the Anellovirus NCR of any of Tables N1-N32, or a nucleic acid sequence having at least about 70%, 75%, 80%, 85%, 90%, 95%, 96%, 97%, 98%, or 99% sequence identity thereto.
[1289] 702. The anellovector of any of the preceding embodiments, wherein the ORF1 molecule comprises an arginine-rich region that binds the Anellovirus GC-rich region.
[1290] 703. The anellovector of any of the preceding embodiments, wherein the first Anellovirus genomic sequence is a wild-type Anellovirus genome sequence (e.g., as described herein, e.g., in any of Tables N1-N32).
[1291] 704. The anellovector of any of the preceding embodiments, wherein the second Anellovirus genomic sequence is a wild-type Anellovirus genome sequence (e.g., as described herein, e.g., in any of Tables N1-N32).
[1292] 705. The anellovector of any of the preceding embodiments, wherein the genetic element does not comprise an inverted terminal repeat (ITR) (e.g., an AAV ITR), or a nucleic acid sequence having at least 90%, 95%, 96%, 97%, 98%, 99%, or 100% identity thereto.
[1293] 706. The anellovector of any of the preceding embodiments, wherein the genetic element does not comprise a contiguous nucleic acid sequence of at least 50, 60, 70, 80, 90, 100, 150, 200, 250, 300, 400, or 500 nucleotides in length having at least 90%, 95%, 96%, 97%, 98%, 99%, or 100% identity to a contiguous nucleic acid sequence from an AAV genome sequence.
[1294] 707. The anellovector of any of the preceding embodiments, wherein the genetic element is DNA.
[1295] 708. The anellovector of any of the preceding embodiments, wherein the genetic element is circular, single stranded DNA.
[1296] 709. The anellovector of embodiment 707 or 708, wherein the genetic element comprises a promoter element operably linked to the nucleic acid sequence encoding the exogenous effector.
[1297] 710. The anellovector of any of embodiments 662-706, wherein the genetic element is RNA, e.g., mRNA.
[1298] 711. The anellovector of any of the preceding embodiments, wherein the exogenous effector comprises: an intracellular peptide, an intracellular polypeptide, a secreted polypeptide, or a protein replacement therapeutic.
[1299] 712. An anellovector comprising:
[1300] (i) a proteinaceous exterior comprising an ORF1 molecule having an ORF1 sequence of SEQ ID NO: 211, or a polypeptide comprising an amino acid sequence having at least about 70%, 75%, 80%, 85%, 90%, 95%, 96%, 97%, 98%, or 99% sequence identity thereto, and
[1301] (ii) a genetic element enclosed by the proteinaceous exterior, wherein the genetic element comprises a promoter element operably linked to a nucleic acid sequence (e.g., a DNA sequence) encoding an exogenous effector.
[1302] 713. An anellovector comprising:
[1303] (i) a proteinaceous exterior comprising a polypeptide encoded by an Anellovirus ORF1 nucleic acid sequence as listed in Table N32, or a polypeptide encoded by a nucleic acid sequence having at least about 70%, 75%, 80%, 85%, 90%, 95%, 96%, 97%, 98%, or 99% sequence identity to the Anellovirus ORF1 nucleic acid sequence, and
[1304] (ii) a genetic element enclosed by the proteinaceous exterior, wherein the genetic element comprises a promoter element operably linked to a nucleic acid sequence (e.g., a DNA sequence) encoding an exogenous effector.
[1305] 714. An anellovector comprising:
[1306] (i) a proteinaceous exterior (e.g., comprising an Anellovirus ORF1 molecule, e.g., as described herein, e.g., of SEQ ID NO: 211, or a polypeptide comprising an amino acid sequence having at least about 70%, 75%, 80%, 85%, 90%, 95%, 96%, 97%, 98%, or 99% sequence identity thereto), and
[1307] (ii) a genetic element enclosed by the proteinaceous exterior, wherein the genetic element comprises:
[1308] (a) one or both of:
   [1309] (a1) an Anellovirus GC-rich region, wherein the Anellovirus GC-rich region has a sequence of the reverse complement of the Anellovirus GC-rich region of SEQ ID NO: 210, or a nucleic acid sequence having at least about 90%, 95%, 96%, 97%, 98%, or 99% sequence identity thereto; and
   [1310] (a2) an Anellovirus 5′ UTR conserved domain, wherein the Anellovirus 5′ UTR conserved domain has a sequence of the reverse complement of the Anellovirus 5′ UTR conserved domain of SEQ ID NO: 210, or a nucleic acid sequence having at least about 90%, 95%, 96%, 97%, 98%, or 99% sequence identity thereto; and
[1311] (b) a promoter element operably linked to a nucleic acid sequence (e.g., a DNA sequence) encoding an exogenous effector.
[1312] 715. An isolated nucleic acid molecule (e.g., a genetic element construct or a genetic element) comprising:
[1313] (a) one or both of:
   [1314] (a1) an Anellovirus GC-rich region, wherein the Anellovirus GC-rich region has a sequence of the reverse complement of the Anellovirus GC-rich region of SEQ ID NO: 210, or a nucleic acid sequence having at least about 90%, 95%, 96%, 97%, 98%, or 99% sequence identity thereto; and
   [1315] (a2) an Anellovirus 5′ UTR conserved domain, wherein the Anellovirus 5′ UTR conserved domain has a sequence of the reverse complement of the Anellovirus 5′ UTR conserved domain of SEQ ID NO: 210, or a nucleic acid sequence having at least about 90%, 95%, 96%, 97%, 98%, or 99% sequence identity thereto; and
[1316] (b) a promoter element operably linked to a nucleic acid sequence (e.g., a DNA sequence) encoding an exogenous effector.
[1317] 716. An anellovector comprising:
[1318] (i) a proteinaceous exterior comprising an ORF1 molecule having an ORF1 sequence of SEQ ID NO: 208, or a polypeptide comprising an amino acid sequence having at least about 70%, 75%, 80%, 85%, 90%, 95%, 96%, 97%, 98%, or 99% sequence identity thereto, and
[1319] (ii) a genetic element enclosed by the proteinaceous exterior, wherein the genetic element comprises a promoter element operably linked to a nucleic acid sequence (e.g., a DNA sequence) encoding an exogenous effector.
[1320] 717. An anellovector comprising:
[1321] (i) a proteinaceous exterior comprising a polypeptide encoded by an Anellovirus ORF1 nucleic acid sequence as listed in Table N31, or a polypeptide encoded by a nucleic acid sequence having at least about 70%, 75%, 80%, 85%, 90%, 95%, 96%, 97%, 98%, or 99% sequence identity to the Anellovirus ORF1 nucleic acid sequence, and
[1322] (ii) a genetic element enclosed by the proteinaceous exterior, wherein the genetic element comprises a promoter element operably linked to a nucleic acid sequence (e.g., a DNA sequence) encoding an exogenous effector.
[1323] 718. An anellovector comprising:
[1324] (i) a proteinaceous exterior (e.g., comprising an Anellovirus ORF1 molecule, e.g., as described herein, e.g., of SEQ ID NO: 208, or a polypeptide comprising an amino acid sequence having at least about 70%, 75%, 80%, 85%, 90%, 95%, 96%, 97%, 98%, or 99% sequence identity thereto), and
[1325] (ii) a genetic element enclosed by the proteinaceous exterior, wherein the genetic element comprises:
[1326] (a) one or both of:
   [1327] (a1) an Anellovirus GC-rich region, wherein the Anellovirus GC-rich region has a sequence of the reverse complement of the Anellovirus GC-rich region of SEQ ID NO: 207, or a nucleic acid sequence having at least about 90%, 95%, 96%, 97%, 98%, or 99% sequence identity thereto; and
   [1328] (a2) an Anellovirus 5′ UTR conserved domain, wherein the Anellovirus 5′ UTR conserved domain has a sequence of the reverse complement of the Anellovirus 5′ UTR conserved domain of SEQ ID NO: 207, or a nucleic acid sequence having at least about 90%, 95%, 96%, 97%, 98%, or 99% sequence identity thereto;
[1329] (b) a promoter element operably linked to a nucleic acid sequence (e.g., a DNA sequence) encoding an exogenous effector.
[1330] 719. An isolated nucleic acid molecule (e.g., a genetic element construct or a genetic element) comprising:
[1331] (a) one or both of:
   [1332] (a1) an Anellovirus GC-rich region, wherein the Anellovirus GC-rich region has a sequence of the reverse complement of the Anellovirus GC-rich region of SEQ ID NO: 207, or a nucleic acid sequence having at least about 90%, 95%, 96%, 97%, 98%, or 99% sequence identity thereto; and
   [1333] (a2) an Anellovirus 5′ UTR conserved domain, wherein the Anellovirus 5′ UTR conserved domain has a sequence of the reverse complement of the Anellovirus 5′ UTR conserved domain of SEQ ID NO: 207, or a nucleic acid sequence having at least about 90%, 95%, 96%, 97%, 98%, or 99% sequence identity thereto; and
[1334] (b) a promoter element operably linked to a nucleic acid sequence (e.g., a DNA sequence) encoding an exogenous effector.
[1335] 720. An anellovector comprising:
[1336] (i) a proteinaceous exterior comprising an ORF1 molecule having an ORF1 sequence of SEQ ID NO: 205, or a polypeptide comprising an amino acid sequence having at least about 70%, 75%, 80%, 85%, 90%, 95%, 96%, 97%, 98%, or 99% sequence identity thereto, and
[1337] (ii) a genetic element enclosed by the proteinaceous exterior, wherein the genetic element comprises a promoter element operably linked to a nucleic acid sequence (e.g., a DNA sequence) encoding an exogenous effector.
[1338] 721. An anellovector comprising:
[1339] (i) a proteinaceous exterior comprising a polypeptide encoded by an Anellovirus ORF1 nucleic acid sequence as listed in Table N30, or a polypeptide encoded by a nucleic acid sequence having at least about 70%, 75%, 80%, 85%, 90%, 95%, 96%, 97%, 98%, or 99% sequence identity to the Anellovirus ORF1 nucleic acid sequence, and
[1340] (ii) a genetic element enclosed by the proteinaceous exterior, wherein the genetic element comprises a promoter element operably linked to a nucleic acid sequence (e.g., a DNA sequence) encoding an exogenous effector.
[1341] 722. An anellovector comprising:
[1342] (i) a proteinaceous exterior (e.g., comprising an Anellovirus ORF1 molecule, e.g., as described herein, e.g., of SEQ ID NO: 205, or a polypeptide comprising an amino acid sequence having at least about 70%, 75%, 80%, 85%, 90%, 95%, 96%, 97%, 98%, or 99% sequence identity thereto), and
[1343] (ii) a genetic element enclosed by the proteinaceous exterior, wherein the genetic element comprises:
[1344] (a) one or both of:
   [1345] (a1) an Anellovirus GC-rich region, wherein the Anellovirus GC-rich region has a sequence of the reverse complement of the Anellovirus GC-rich region of SEQ ID NO: 204, or a nucleic acid sequence having at least about 90%, 95%, 96%, 97%, 98%, or 99% sequence identity thereto; and
   [1346] (a2) an Anellovirus 5′ UTR conserved domain, wherein the Anellovirus 5′ UTR conserved domain has a sequence of the reverse complement of the Anellovirus 5′ UTR conserved domain of SEQ ID NO: 204, or a nucleic acid sequence having at least about 90%, 95%, 96%, 97%, 98%, or 99% sequence identity thereto;
[1347] (b) a promoter element operably linked to a nucleic acid sequence (e.g., a DNA sequence) encoding an exogenous effector.
[1348] 723. An isolated nucleic acid molecule (e.g., a genetic element construct or a genetic element) comprising:
[1349] (a) one or both of:
   [1350] (a1) an Anellovirus GC-rich region, wherein the Anellovirus GC-rich region has a sequence of the reverse complement of the Anellovirus GC-rich region of SEQ ID NO: 204, or a nucleic acid sequence having at least about 90%, 95%, 96%, 97%, 98%, or 99% sequence identity thereto; and
   [1351] (a2) an Anellovirus 5′ UTR conserved domain, wherein the Anellovirus 5′ UTR conserved domain has a sequence of the reverse complement of the Anellovirus 5′ UTR conserved domain of SEQ ID NO: 204, or a nucleic acid sequence having at least about 90%, 95%, 96%, 97%, 98%, or 99% sequence identity thereto; and
[1352] (b) a promoter element operably linked to a nucleic acid sequence (e.g., a DNA sequence) encoding an exogenous effector.
[1353] 724. An isolated cell comprising an anellovector of any of embodiments 662-714, 716-718, or 720-722.
[1354] 725. An isolated cell comprising:
   [1355] (a) a nucleic acid molecule encoding the ORF1 molecule of any of SEQ ID NOs: 210, 207, or 204, or a nucleic acid sequence having at least about 90%, 95%, 96%, 97%, 98%, or 99% sequence identity thereto, or an Anellovirus ORF1 nucleic acid sequence as listed in any of Tables N30-N32, or a nucleic acid sequence having at least about 70%, 75%, 80%, 85%, 90%, 95%, 96%, 97%, 98%, or 99% sequence identity thereto; and
   [1356] (b) a genetic element construct or a genetic element (e.g., as described herein).
[1357] 726. An isolated cell comprising:
   [1358] (a) an ORF1 molecule of any of SEQ ID NOs: 211, 208, or 205, or an amino acid sequence having at least about 90%, 95%, 96%, 97%, 98%, or 99% sequence identity thereto or a polypeptide encoded by an Anellovirus ORF1 nucleic acid sequence as listed in any of Tables N30-N32, or a polypeptide encoded by a nucleic acid sequence having at least about 70%, 75%, 80%, 85%, 90%, 95%, 96%, 97%, 98%, or 99% sequence identity to the Anellovirus ORF1 nucleic acid sequence; and
   [1359] (b) a genetic element construct (e.g., as described herein) or a genetic element.
[1360] 727. A method of manufacturing an anellovector composition comprising the anellovector of any of embodiments 662-714, 716-718, or 720-722, the method comprising:
[1361] (a) providing a cell, e.g., a host cell as described herein;
[1362] (b) introducing a nucleic acid molecule encoding the ORF1 molecule;
[1363] (c) introducing into the cell a genetic element construct comprising the sequence of the genetic element (e.g., before, after, or simultaneously with (b)),
[1364] (d) incubating the cell under conditions that allow the cell to produce anellovector; and
[1365] (e) formulating the anellovector, e.g., as a pharmaceutical composition suitable for administration to a subject,
[1366] thereby making the anellovector composition.
[1367] 728. A method of manufacturing an anellovector composition comprising the anellovector of any of embodiments 662-714, 716-718, or 720-722, the method comprising:
[1368] (a) providing an ORF1 molecule;
[1369] (b) contacting the ORF1 molecule with a genetic element in a cell-free system under conditions that allow for formation of the proteinaceous exterior comprising the ORF1 molecule, wherein the genetic element is enclosed by the proteinaceous exterior, and
[1370] (c) formulating the anellovector, e.g., as a pharmaceutical composition suitable for administration to a subject,
[1371] thereby making the anellovector composition.
[1372] 729. A method of delivering an exogenous effector to a cell, tissue, or subject, the method comprising administering to the cell, tissue, or subject an anellovector of any of embodiments 662-714, 716-718, or 720-722.
[1373] 730. The method of embodiment 729, wherein the tissue comprises an eye tissue, e.g., the retina or posterior eye cup.
[1374] 731. The method of embodiment 729, wherein the tissue comprises lung, muscle, bone marrow, blood, heart, GI or skin.
[1375] 732. The Anelloviridae family vector (e.g., anellovector) of any of the preceding embodiments, wherein the proteinaceous exterior (e.g., ORF1 molecule of the proteinaceous exterior) comprises the amino acid sequence YNPX²DXGX²N (SEQ ID NO: 829), wherein Xⁿ is a contiguous sequence of any n amino acids.
[1376] 733. The Anelloviridae family vector of claim 732, wherein the amino acid sequence YNPX²DXGX²N (SEQ ID NO: 829) is comprised in an N22 domain of the ORF1 molecule.
[1377] 734. The Anelloviridae family vector of any of the preceding embodiments, wherein the ORF1 molecule comprises one or more (e.g., 1, 2, 3, 4, or all 5) of the following Anellovirus ORF1 subdomains: an arginine-rich region, a jelly-roll region, a hypervariable region, an N22 domain, a C-terminal domain (CTD) (e.g., as described herein), e.g., of an Anellovirus ORF1 protein as listed in Table A1-A32 (or a sequence having at least about 70%, 75%, 80%, 85%, 90%, 95%, 96%, 97%, 98%, 99%, or 100% sequence identity thereto).
[1378] 735. The isolated nucleic acid molecule of any of embodiments 715, 719, or 723, wherein the isolated nucleic acid molecule comprises at least one difference (e.g., a mutation, chemical modification, or epigenetic alteration) relative to a wild-type Anellovirus genome sequence (e.g., as described herein)
[1379] 736. The isolated nucleic acid molecule of embodiment 735, wherein the at least one difference comprises a deletion (e.g., lacks one or more of: a 5′ UTR conserved domain, an ORF1 gene, ORF2 gene, a GC-rich region, an ORF3 gene, or a functional fragment thereof).
[1380] 737. The isolated nucleic acid molecule of any of embodiments 715, 719, 723, 735 or 736, wherein the isolated nucleic acid molecule is substantially unable to be enclosed in an Anellovirus capsid (e.g., a proteinaceous exterior of an Anelloviridae family vector (e.g., anellovector) as described herein).
[1381] 738. The isolated nucleic acid molecule of any of embodiments 715, 719, 723, or 735-737, wherein the isolated nucleic acid molecule encodes an effector (e.g., an exogenous effector or an endogenous effector).
[1382] 739. The genetic element of any of the preceding embodiments, which further comprises a promoter.
[1383] 740. The genetic element of any of the preceding embodiments, which further comprises a poly A sequence.
[1384] 741. The pharmaceutical composition of any of the preceding embodiments, wherein the pharmaceutical composition has one or more of the following characteristics:
[1385] a) the pharmaceutical composition meets a pharmaceutical or good manufacturing practices (GMP) standard;
[1386] b) the pharmaceutical composition was made according to good manufacturing practices (GMP);
[1387] c) the pharmaceutical composition has a pathogen level below a predetermined reference value, e.g., is substantially free of pathogens;
[1388] d) the pharmaceutical composition has a contaminant level below a predetermined reference value, e.g., is substantially free of contaminants;
[1389] e) the pharmaceutical composition has a predetermined level of non-infectious particles or a predetermined ratio of particles:infectious units (e.g., <300:1, <200:1, <100:1, or <50:1), or
[1390] f) the pharmaceutical composition has low immunogenicity or is substantially non-immunogenic, e.g., as described herein.
[1391] 742. The pharmaceutical composition of any one of the preceding embodiments, wherein the pharmaceutical composition has a contaminant level below a predetermined reference value, e.g., is substantially free of contaminants.
[1392] 743. The pharmaceutical composition of embodiment 742, wherein the contaminant is selected from the group consisting of: mycoplasma, endotoxin, host cell nucleic acids (e.g., host cell DNA and/or host cell RNA), animal-derived process impurities (e.g., serum albumin or trypsin), replication-competent agents (RCA), e.g., replication-competent virus or unwanted Anelloviridae family vector (e.g., anellovector) (e.g., an Anelloviridae family vector other than the desired Anelloviridae family vector, e.g., a synthetic Anelloviridae family vector as described herein), free viral capsid protein, adventitious agents, and aggregates.
[1393] 744. The pharmaceutical composition of embodiment 742, wherein the contaminant is host cell DNA and the threshold amount is about 10 ng of host cell DNA per dose of the pharmaceutical composition.
[1394] 745. The pharmaceutical composition of any one of the preceding embodiments, wherein the pharmaceutical composition comprises less than 10% (e.g., less than about 10%, 5%, 4%, 3%, 2%, 1%, 0.5%, or 0.1%) contaminant by weight.
[1395] 746. The genetic element, Anelloviridae family vector (e.g., anellovector), nucleic acid molecule, or method of any of the preceding embodiments, wherein the genetic element is single-stranded.
[1396] 747. The genetic element, Anelloviridae family vector (e.g., anellovector), nucleic acid molecule, or method of any of the preceding embodiments, wherein the genetic element is circular.
[1397] 748. The genetic element, Anelloviridae family vector (e.g., anellovector), nucleic acid molecule, or method of any of the preceding embodiments, wherein the genetic element comprises DNA.
[1398] 749. The genetic element, Anelloviridae family vector (e.g., anellovector), nucleic acid molecule, or method of any of the preceding embodiments, wherein the genetic element is a negative strand DNA.
[1399] 750. The genetic element, Anelloviridae family vector (e.g., anellovector), nucleic acid molecule, or method of any of the preceding embodiments, wherein the genetic element is double-stranded.
[1400] 751. The genetic element, Anelloviridae family vector (e.g., anellovector), nucleic acid molecule, or method of any of the preceding embodiments, wherein the genetic element is linear.
[1401] 752. The genetic element, Anelloviridae family vector (e.g., anellovector), nucleic acid molecule, or method of any of the preceding embodiments, wherein the genetic element comprises RNA.
[1402] 753. The genetic element, Anelloviridae family vector (e.g., anellovector), nucleic acid molecule, or method of any of the preceding embodiments, wherein the genetic element comprises a nucleic acid sequence encoding an Anelloviridae capsid protein, e.g., an Anellovirus ORF1 molecule (e.g., an ORF1 protein as listed in Table A1-A32 or an amino acid sequence having at least 70%, 75%, 80%, 85%, 90%, 95%, 96%, 97%, 98%, or 99% sequence identity thereto).
[1403] 754. The genetic element, Anelloviridae family vector (e.g., anellovector), nucleic acid molecule, or method of any of the preceding embodiments, wherein the genetic element does not comprise a nucleic acid sequence encoding an Anelloviridae capsid protein, e.g., an Anellovirus ORF1 molecule (e.g., an ORF1 protein as listed in Table A1-A32 or an amino acid sequence having at least 70%, 75%, 80%, 85%, 90%, 95%, 96%, 97%, 98%, or 99% sequence identity thereto).
[1404] 755. The genetic element, Anelloviridae family vector (e.g., anellovector), nucleic acid molecule, or method of any of the preceding embodiments, wherein the genetic element comprises a nucleic acid sequence encoding an Anellovirus ORF2 molecule (e.g., an ORF2 protein as listed in Table A1-A32, or an amino acid sequence having at least 70%, 75%, 80%, 85%, 90%, 95%, 96%, 97%, 98%, or 99% sequence identity thereto).
[1405] 756. The genetic element, Anelloviridae family vector (e.g., anellovector), nucleic acid molecule, or method of any of the preceding embodiments, wherein the genetic element does not comprise a nucleic acid sequence encoding an Anellovirus ORF2 molecule (e.g., an ORF2 protein as listed in Table A1-A32 or an amino acid sequence having at least 70%, 75%, 80%, 85%, 90%, 95%, 96%, 97%, 98%, or 99% sequence identity thereto).
[1406] 757. The genetic element, Anelloviridae family vector (e.g., anellovector), nucleic acid molecule, or method of any of the preceding embodiments, wherein the genetic element comprises at least 20, 25, 30, 31, 32, 33, 34, 35, 36, 37, 38, 39, or 40 consecutive nucleotides having a GC content of at least 70%, 75%, 80%, 85%, 90%, 95%, or 99%.
[1407] 758. The Anelloviridae family vector (e.g., anellovector), nucleic acid molecule, or method of any of the preceding embodiments, wherein the proteinaceous exterior comprises the amino acid sequence YNPX²DXGX²N (SEQ ID NO: 829), wherein Xⁿ is a contiguous sequence of any n amino acids.
[1408] 759. The Anelloviridae family vector (e.g., anellovector), nucleic acid molecule, or method of embodiment 758, wherein the amino acid sequence YNPX²DXGX²N (SEQ ID NO: 829) is comprised in an N22 domain.
[1409] 760. The Anelloviridae family vector (e.g., anellovector), nucleic acid molecule, or method of any of the preceding embodiments, wherein the ORF1 molecule comprises an arginine-rich region (e.g., having at least 70%, 80%, 85%, 90%, 95%, 96%, 97%, 98%, 99%, or 100% identity to an arginine-rich region sequence of an ORF1 protein listed in Table A1-A32).
[1410] 761. The Anelloviridae family vector (e.g., anellovector), nucleic acid molecule, or method of any of the preceding embodiments, wherein the proteinaceous exterior comprises an amino acid sequence of at least 15, 20, 25, 26, 27, 28, 29, 30, 31, 32, 33, 34, 35, 36, 37, 38, 39, 40, 45, or 50 consecutive nucleotides comprising at least 40% (e.g., at least 40%, 41%, 42%, 43%, 44%, 45%, 46%, 47%, 48%, 49%, 50%, 55%, 60%, 65%, 66%, 67%, 68%, 69%, 70%, 75%, 80%, 85%, 90%, or 95%) arginine residues.
[1411] 762. The Anelloviridae family vector (e.g., anellovector), nucleic acid molecule, or method of embodiment 760 or 761, wherein the arginine-rich region is located at the N-terminal or C-terminal end of the ORF1 molecule.
[1412] 763. The genetic element, Anelloviridae family vector (e.g., anellovector), nucleic acid molecule, or method of any of the preceding embodiments, wherein the genetic element comprises one or more of: a TATA box, an initiator element, a cap site, a transcriptional start site, an ORF1/1-encoding sequence, an ORF1/2-encoding sequence, an ORF2/2-encoding sequence, an ORF2/3-encoding sequence, an ORF2/3 t-encoding sequence, a three open-reading frame region, a poly(A) signal, and/or a GC-rich region from an Anellovirus described herein, or a sequence having at least 70%, 75%, 80%, 85%, 90%, 95%, 96%, 97%, 98%, 99%, or 100% sequence identity thereto.
[1413] 764. The genetic element, Anelloviridae family vector (e.g., anellovector), nucleic acid molecule, or method of any of the preceding embodiments, wherein the genetic element comprises at least 75% (e.g., at least 75, 76, 77, 78, 79, 80, 85, 90, 91, 92, 93, 94, 95, 96, 97, 98, 99, or 100%) sequence identity to a 5′ UTR conserved domain sequence as described herein.
[1414] 765. The genetic element, Anelloviridae family vector (e.g., anellovector), nucleic acid molecule, or method of any of the preceding embodiments, wherein the genetic element comprises at least 75% (e.g., at least 75, 76, 77, 78, 79, 80, 85, 90, 91, 92, 93, 94, 95, 96, 97, 98, 99, or 100%) sequence identity to a GC-rich region sequence as described herein.
[1415] 766. The genetic element, Anelloviridae family vector (e.g., anellovector), nucleic acid molecule, or method of any of the preceding embodiments, wherein the effector encodes a therapeutic agent, e.g., a therapeutic peptide or polypeptide or a therapeutic nucleic acid.
[1416] 767. The genetic element, Anelloviridae family vector (e.g., anellovector), nucleic acid molecule, or method of any of the preceding embodiments, wherein the effector is an exogenous effector.
[1417] 768. The Anelloviridae family vector (e.g., anellovector), nucleic acid molecule, or method of any of the preceding embodiments, wherein the effector is an endogenous effector (e.g., wherein the anellovector overexpresses the endogenous effector in a target cell).
[1418] 769. The genetic element, Anelloviridae family vector (e.g., anellovector), nucleic acid molecule, or method of any of the preceding embodiments, wherein the effector modulates expression or activity of a gene or protein, e.g., increases or decreases expression or activity of the gene or protein.
[1419] 770. The Anelloviridae family vector (e.g., anellovector), nucleic acid molecule, or method of any of the preceding embodiments, wherein the Anelloviridae family vector is capable of replicating autonomously.
[1420] 771. The Anelloviridae family vector (e.g., anellovector), nucleic acid molecule, or method of any of the preceding embodiments, wherein the Anelloviridae family vector is replication-deficient (e.g., incapable of replicating autonomously).
[1421] 772. The genetic element, Anelloviridae family vector (e.g., anellovector), nucleic acid molecule, or method of any of the preceding embodiments, wherein the genetic element integrates into the genome of a eukaryotic cell at a frequency of less than about 0.001%, 0.005%, 0.01%, 0.05%, 0.1%, 0.5%, 1%, 1.5%, or 2% of the genetic element that enters the cell.
[1422] 773. The Anelloviridae family vector (e.g., anellovector), nucleic acid molecule, or method of any of the preceding embodiments, wherein the Anelloviridae family vector is substantially non-pathogenic, e.g., does not induce a detectable deleterious symptom in a subject (e.g., elevated cell death or toxicity, e.g., relative to a subject not exposed to the anellovector).
[1423] 774. The Anelloviridae family vector (e.g., anellovector), nucleic acid molecule, or method of any of the preceding embodiments, wherein the Anelloviridae family vector is substantially non-immunogenic, e.g., does not induce a detectable and/or unwanted immune response.
[1424] 775. The Anelloviridae family vector (e.g., anellovector), nucleic acid molecule, or method of any of the preceding embodiments, wherein a population of at least 1000 of the Anelloviridae family vectors is capable of delivering at least about 100 copies (e.g., at least 1, 2, 3, 4, 5, 10, 20, 30, 40, 50, 100, 200, 300, 400, 500, 600, 700, 800, 900, or 1000 copies) of the genetic element into one or more eukaryotic cells (e.g., mammalian cells, e.g., human cells).
[1425] 776. The Anelloviridae family vector (e.g., anellovector), nucleic acid molecule, or method of any of the preceding embodiments, wherein a population of the Anelloviridae family vectors (e.g., at least 1, 2, 3, 4, 5, 10, 20, 30, 40, 50, 100, 200, 300, 400, 500, 600, 700, 800, 900, or 1000 genome equivalents of the genetic element per cell) is capable of delivering the genetic element into at least 10%, 20%, 30%, 40%, 50%, 60%, 70%, 80%, 90%, 95%, 99%, or more of a population of eukaryotic cells (e.g., mammalian cells, e.g., human cells).
[1426] 777. The Anelloviridae family vector (e.g., anellovector), nucleic acid molecule, or method of any of the preceding embodiments, wherein a population of the Anelloviridae family vectors (e.g., at least 1, 2, 3, 4, 5, 10, 20, 30, 40, 50, 100, 200, 300, 400, 500, 600, 700, 800, 900, or 1000 genome equivalents of the genetic element per cell) is capable of delivering at least 1, 2, 3, 4, 5, 6, 7, 8, 9, 10, 20, 50, 100, 200, 500, 1000, 2000, 5000, 8,000, 1×10⁴, 1×10⁵, 1×10⁶, 1×10⁷ or greater copies of the genetic element per cell to a population of eukaryotic cells (e.g., mammalian cells, e.g., human cells).
[1427] 778. The Anelloviridae family vector (e.g., anellovector), nucleic acid molecule, or method of any of the preceding embodiments, wherein a population of the Anelloviridae family vectors (e.g., at least 1, 2, 3, 4, 5, 10, 20, 30, 40, 50, 100, 200, 300, 400, 500, 600, 700, 800, 900, or 1000 genome equivalents of the genetic element per cell) is capable of delivering 1-3, 1-4, 1-5, 1-6, 1-7, 1-8, 1-9, 1-10, 5-10, 10-20, 20-50, 50-100, 100-1000, 1000-10⁴, 1×10⁴-1×10⁵, 1×10⁴-1×10⁶, 1×10⁴-1×10⁷, 1×10⁵-1×10⁶, 1×10⁵-1×10⁷, or 1×10⁶-1×10⁷ copies of the genetic element per cell to a population of eukaryotic cells (e.g., mammalian cells, e.g., human cells).
[1428] 779. The Anelloviridae family vector (e.g., anellovector), nucleic acid molecule, or method of any of the preceding embodiments, wherein the target cells into which the genetic element is delivered each receive at least 10, 50, 100, 500, 1000, 10,000, 50,000, 100,000, or more copies of the genetic element.
[1429] 780. The Anelloviridae family vector (e.g., anellovector), nucleic acid molecule, or method of any of the preceding embodiments, wherein the Anelloviridae family vector is resistant to degradation by a detergent (e.g., a mild detergent, e.g., a biliary salt, e.g., sodium deoxycholate) relative to a viral particle comprising an external lipid bilayer, e.g., a retrovirus.
[1430] 781. The Anelloviridae family vector (e.g., anellovector), nucleic acid molecule, or method of any of the preceding embodiments, wherein the genetic element enclosed by the proteinaceous exterior is resistant to degradation by a nuclease enzyme (e.g., a DNase).
[1431] 782. The Anelloviridae family vector (e.g., anellovector), nucleic acid molecule, or method of any of the preceding embodiments, wherein the Anelloviridae family vector is capable of infecting mammalian cells, e.g., human cells, e.g., in vitro, in vivo, or ex vivo.
[1432] 783. The Anelloviridae family vector (e.g., anellovector), nucleic acid molecule, or method of any of the preceding embodiments, wherein the Anelloviridae family vector selectively delivers the effector to, or is present at higher levels in (e.g., preferentially accumulates in), a desired cell type, tissue, or organ.
[1433] 784. The Anelloviridae family vector (e.g., anellovector), nucleic acid molecule, or method of any of the preceding embodiments, wherein the proteinaceous exterior is provided in cis relative to the genetic element.
[1434] 785. The Anelloviridae family vector (e.g., anellovector), nucleic acid molecule, or method of any of the preceding embodiments, wherein the proteinaceous exterior is provided in trans relative to the genetic element.
[1435] 786. The method of any of embodiments 727-731, wherein the Anelloviridae family vector is substantially free of wild-type Anellovirus genomes.

[1436] Other features, objects, and advantages of the invention will be apparent from the description and drawings, and from the claims.

[1437] Unless otherwise defined, all technical and scientific terms used herein have the same meaning as commonly understood by one of ordinary skill in the art to which this invention belongs. All publications, patent applications, patents, and other references mentioned herein are incorporated by reference in their entirety. In addition, the materials, methods, and examples are illustrative only and not intended to be limiting.

### BRIEF DESCRIPTION OF THE DRAWINGS

[1438] The following detailed description of the embodiments of the invention will be better understood when read in conjunction with the appended drawings. For the purpose of illustrating the invention, there are shown in the drawings embodiments that are presently exemplified. It should be understood, however, that the invention is not limited to the precise arrangement and instrumentalities of the embodiments shown in the drawings. The patent or application file contains at least one drawing executed in color. Copies of this patent or patent application publication with color drawing(s) will be provided by the Office upon request and payment of the necessary fee.

[1439] FIG. 1 is a series of diagrams showing production of exemplary malaria peptide conjugation constructs comprising the C-terminal region of a CS protein.

[1440] FIG. 2 is a series of diagrams showing the structure of an exemplary malaria peptide conjugation construct on the surface of an anellovector capsid.

[1441] FIG. 3 is a diagram showing separation of in vitro circularized DNA into positive and negative sense circularized single-stranded DNA (ssDNA) after denaturation.

[1442] FIGS. 4A and 4B are a series of diagrams showing successful expression of Anellovirus ORF1 molecules in cells. (A) Anellovirus strains for which ORF1 expression was detected from Sf9 cells included Ring2, Ring3, Ring4, Ring5, Ring6, Ring9, and Ring10 (e.g., as described herein). (B) Virus-like particles (VLPs) were observed by electron microscopy after production of Anellovirus ORF1 proteins for Ring2 and Ring10, as well as for chicken anemia virus (CAV) VP1.

[1443] FIGS. 5A-5C are a series of diagrams showing successful expression and purification of Ring2 ORF1 and ORF2 proteins from Sf9 cells. (A) Exemplary workflow for purification of ORF1 and ORF2 proteins from Sf9 cells. (B) Western blot using anti-ORF1 antibody, showing detection of Ring2 ORF1 proteins produced in Sf9 cells as described. (C) Electron micrograph showing formation of virus-like particles (VLPs) from Ring2 ORF1 proteins produced in Sf9 cells as described.

[1444] FIGS. 6A-6C are a series of diagrams showing disassembly of Ring2 VLPs using urea as a chaotropic denaturant. (A) Ring2 ORF1 protein was produced and purified from Sf9 cells as described, and VLPs were detected by electron microscopy. (B) After treatment with urea, VLPs are no longer observed, but instead the solution contains small ORF1 capsomers. (C) Expanded view of the boxed area shown in FIG. 6B, showing detail of the capsomers.

[1445] FIGS. 7A-7B are a series of electron micrographs showing exemplary symmetrical (A) and asymmetrical (B) particle morphologies.

[1446] FIG. 8 is a schematic showing an exemplary workflow for production of anellovectors (e.g., replication-competent or replication-deficient anellovectors as described herein).

[1447] FIG. 9 is a diagram showing an alignment of 36-nucleotide GC-rich regions from nine Anellovirus genome sequences, and a consensus sequence based thereon (SEQ ID NOS 818-827, respectively, in order of appearance).

[1448] FIG. 10 is a series of diagrams showing ORF1 structures from Anellovirus strains LY2 and CBD203. Putative domains are labeled: arginine-rich region (arg-rich), core region comprising a structural jelly-roll domain, hypervariable region (HVR), structural N22 region, and structural C-terminal domain (CTD), as indicated.

[1449] FIG. 11A is a schematic presentation of full-length Ring 10 ORF1 (also referred to herein as Ly1) labeled and colored by domains. The structural arginine-rich motif (ARM) is shown in purple, the structural jelly roll (JR) domain is shown in red, the spike P1 domain is shown in blue, the spike P2 domain is shown in green, and the C-terminal domain is shown in cyan. Residue numbers beginning each domain and the structural C-terminal domain (also referred to as the C-terminus) are indicated above.

[1450] FIG. 11B is the sequence of full-length Ring 10 ORF1 colored as in FIG. 14A with residue numbers indicated above. In bold are residues included in the Ring 10 delARM construct including the initial residue, K46, which is labeled. A dashed line above the sequence indicates residues not observed in the density. Secondary structure elements are indicated above with β-strands as arrows and α-helices as zig-zag lines. The JR β-strands are labeled B—I per convention while additional secondary structures are numbered by their domain. Three peptides used to generate polyclonal antibodies are underlined. Figure discloses SEQ ID NO: 2758.

[1451] FIG. 11C shows western blot analysis of Ring 10 delARM after expression (Expression) and after purification and storage (Purification). A molecular weight marker is labeled to the left of the gels, while arrows on the right indicate the band of Ring 10 delARM before (Ring 10 delARM) and after proteolysis (Ring 10 delARM Fragment). Polyclonal antibodies used to probe the western blots are indicated below and colored by the peptides used to generate them.

[1452] FIG. 11D is an overlay of the 3D reconstruction of Ring 10 delARM VLP electron density and 60-mer VLP molecular structure colored as in FIG. 14A. The spike P1 and P2 domains are labeled.

[1453] FIG. 11E depicts one ORF1 protomer, shown in its electron density with domains labeled and colored as in FIG. 14A.

[1454] FIG. 11F depicts the electron density of Ring 10 delARM VLP colored by its local resolution. The bar (left) indicates the resolution (unit in angstrom) scale by color. The particle (right) is oriented as in FIG. 14D.

[1455] FIG. 12A depicts 60 Ring 10 structural jelly roll (JR) domains with one uniquely colored in red. Sixty Ring 10 structural jelly roll (JR) domains form the core of anellovirus particles.

[1456] FIG. 12B depicts two JR domains, shown in red, with the observed C-terminal domain backbone colored in cyan. The JR domains are arbitrarily labeled JR¹ and JR² with the first (K48) and last (V562) observed residues for each protomer labeled with the corresponding number for clarity.

[1457] FIG. 12C depicts a single JR domain oriented to show the R-sheet on the interior of the particle core. Sidechains of basic residues in position to contact with the viral genome are shown and labeled.

[1458] FIG. 12D depicts the structural arginine-rich region, JR, and structural C-terminal domains of Ring 10 aligned with corresponding ORF1 sequences from different anellovirus genera (indicated in parentheses). Residues of Ring 10 are colored as in FIG. 14A-14D. Basic residues of Ring 10 positioned to potentially contact the viral genome are indicated with asterisks. Figure discloses SEQ ID NOS 2759-2762, respectively, in order of appearance.

[1459] FIG. 13A depicts the anellovirus particle structure as shown as a surface rendering. The particle is shown in gray with 5 spikes forming a crown structure, numbered for clarity and colored as in FIG. 11A-11D. The spike domains extend from the core on the 5-fold axis.

[1460] FIG. 13B depicts the exterior of the crown structure as shown from the side. Five spike domains are colored as in FIG. 16A. The hydrophobic and hydrophilic conserved residues are colored in light blue and magenta, respectively.

[1461] FIG. 13C depicts the same spike domain from FIG. 16B rotated to view residues on the interior of the crown structure.

[1462] FIG. 13D depicts the spike domain of Ring 10 (colored as in FIG. 1A-1D) aligned with ORF1 sequences representative of different anellovirus genera (indicated in parentheses). Magenta and black asterisks indicate the surface-exposed residues of the P1 domain and P2 domain, respectively. Below the alignment are >30% consensus residues, or Ø or γ indicating the residues are >70% hydrophobic or >60% hydrophilic, respectively. Figure discloses SEQ ID NOS 2763-2766, respectively, in order of appearance.

[1463] FIG. 14A is a schematic representation of full-length Ring 10 (top), which shows highly heterogeneous particles by negative-stained electron microscopy (bottom). Scale bar=100 nm.

[1464] FIG. 14B is a schematic representation of Ring 10 delARM (arginine-rich motif; top), which demonstrates a structural homology virus-like particle (VLP) as shown by negative-stained electron microscopy (bottom). Scale bar=100 nm.

[1465] FIG. 14C is a schematic representation of Ring 10 delARM delCTD (top), wherein further truncation of the structural C-terminal domain (Δ552-672) preserves a structured VLP as shown by negative-stained electron microscopy (bottom). Scale bar=100 nm.

[1466] FIG. 15 depicts a data processing procedure of the Ring 10 delARM cryogenic electron microscopy (cryo-EM) reconstruction. In short, crYOLO picked 58,391 particles from 11,083 micrographs. Several rounds of 2D classification resulted in 11,185 particles. After Relion de novo initial model reconstruction, Relion 3D refinement was implemented to obtain the orientation parameters. All particles with parameters were fed in a 3D classification. The class with the most abundant particle population resulted in 3.98 Å resolution.

[1467] FIG. 16A is a representative negative-stained micrograph of Ring 10 delARM. The micrograph was imaged at NanoImaging Service.

[1468] FIG. 16B is a representative cryo-EM micrograph of Ring 10 delARM. The micrograph was imaged at NanoImaging Service.

[1469] FIGS. 17A and 17B depict circular dichroism (CD) results of the TTMV-Ring 10 C-terminal peptide (CSEEEEESNLFERLLRQRTKQLQLKRRIIQTLKDLQKLE (SEQ ID NO: 2505)). FIG. 17A is a table showing averages of secondary structure fractions estimated by different packages of CDPro. α-helix dominates the secondary structure assignment from the CD spectrum. FIG. 17B shows an experimental spectrum of the C-terminal peptide (shown in red) overlaid with the calculated and averaged reference set spectra (shown in blue) from three different packages (SELCON3, CDSSTR, and CONTINLL).

[1470] FIG. 18 depicts sequence alignment of 15 known anelloviruses within different genera indicated in parentheses. The conserved amino acids are shown in the first blue row underneath the sequence. The top blue row underneath the sequence alignment indicates the homology sequence if the conservation is larger than 30%. The bottom blue row shows either hydrophobic (0, within 70% similarity) or 60% positive charged (γ, within 60% similarity) of amino acids, respectively. The alignment was done by Geneious-implemented Clustal Omega. Figure discloses SEQ ID NOS 1012, 58, 2746-2748, 1020, 2749, 2750, 2752, 2751, 2753, 2757, 2755, 2754, and 2756, respectively, in order of appearance.

[1471] FIG. 19A-19D depict the spikes of Ring 10 or alpha-fold predicted JA20 and MN779270.1. FIG. 19A depicts the sphere representation of Ring 10 spike (identical to FIG. 16C). FIGS. 19B and 19C are the spike representations for alpha-fold predicted JA20 and MN779270.1, respectively. P1 and P2 domains are demonstrated in blue and green. The light blue and magenta are the conserved hydrophobic and basic residues. FIG. 19D shows the sequence alignment between Ring 10, JA20, and MN779210.1. Figure discloses SEQ ID NOS 2767-2770 respectively, in order of appearance.

[1472] FIG. 20 is a series of graphs showing that a polyclonal antibody (i.e., AB3725) that recognizes the surface-exposed Ring 10 HVR helix consisting of amino acid residues 352-361 of Ring 10 ORF1 specifically binds to Ring 10 anelloVLPs, but polyclonal antibodies generated against the HVR of different strains (shown as Strain 1 and Strain 2) did not bind to the Ring10 ORF1.

[1473] FIGS. 21A-21B show that AB3725 recognized Ring2 ORF1 mutants into which point mutations K357E, N358Q and E359I from Ring10 ORF1 were introduced. FIG. 21B discloses SEQ ID NOS 2778-2783, respectively, in order of appearance.

[1474] FIGS. 22A-22B are a series of diagrams showing a Coomassie stain and a Western blot for Ring2 virus-like particles (VLPs).

[1475] FIG. 23 is an electron micrograph showing Ring2 VLPs obtained after Capto400 purification.

[1476] FIGS. 24A-24B are a series of diagrams showing a Coomassie stain and a Western blot for Ring19 VLPs.

[1477] FIG. 25 is an electron micrograph showing Ring19 VLPs obtained after Capto400 purification.

[1478] FIG. 26 is a diagram showing an exemplary workflow for conjugating NHS ester moieties to surface lysines of anelloVLPs using click chemistry.

[1479] FIGS. 27A-27B are a series of diagrams showing a Coomassie stain and a Western blot for Ring2 VLPs conjugated with NHS Ester 647.

[1480] FIGS. 28A-28B are a series of diagrams showing Western blots for Ring2 anelloVLPs conjugated with NHS Ester biotin, labeled using a streptavidin CV 800 antibody or a Ring19 HVR3 primary antibody and a goat anti-rabbit secondary antibody.

[1481] FIG. 29 is a diagram showing an exemplary two-step process for conjugating a surface effector moiety to the surface of an anelloVLP.

[1482] FIG. 30 is a diagram showing Coomassie staining, Western blot, and UV labeling for SARS-CoV-2 receptor binding domains (RBD) attached to DBCO, CalFluor 488, Azide, or Alexa488, as shown.

[1483] FIG. 31 is a diagram showing Coomassie staining and Western blot for pRTx-2652 (a Ring 2 ORF1 variant) produced using SE-FPLC.

[1484] FIG. 32 is a diagram showing Coomassie staining and Western blot showing conjugation of RBD attached to an azide moiety to pRTx-2652 ORF1 polypeptide attached to DBCO, to produce RBD-pRTx-2652 conjugate anelloVLPs.

[1485] FIG. 33 is a schematic of an exemplary Cre-loxp based vector system. In this exemplary system, the genetic element sequence comprises, in 5′ to 3′ order, a 3′ NCR comprising a GC-rich region, a 5′ NCR, and a transgene sequence. The genetic element sequence is flanked by lox71 and lox66 sites. Introduction of a Cre recombinase results in excision and circularization of the loxP-flanked sequence to form a double-stranded minicircle comprising the genetic element sequence (shown in the figure as “Vector”). After conversion of the minicircle to a single-stranded circular DNA, Anelloviral proteins, provided in trans, then form a proteinaceous exterior comprising ORF1 molecules around the single-stranded circular DNA, thereby producing a packaged Anellovector.

[1486] FIG. 34 depicts the results of a post-iodixanol DNase-protection assay for batch 1 Anellovector Ring19-fCMV-eGFP material.

[1487] FIG. 35 depicts the results of a pre- and post-concentration DNase-protection assay for batch 1 Anellovector Ring19-fCMV-eGFP material, showing absence of Ring19 WT viral genomes.

[1488] FIG. 36 depicts coomassie (left panel) and silver stain (right panel) on batch 1 Anellovector Ring19-fCMV-eGFP material.

[1489] FIG. 37 depicts four plots of qPCR assays for Ring19-eGFP genetic material in the posterior eye cup (PEC) (top of first page) and the retina (bottom of first page), and WT Ring19 genetic material in the PEC (top of second page) and retina (bottom of second page), showing the presence of eGFP DNA in the retina 21 days after viral transduction.

[1490] FIG. 38 depicts the results of a post-iodixanol DNase-protection assay for batch 2 Anellovector Ring19-fCMV-eGFP material.

[1491] FIG. 39 depicts the results of a pre- and post-concentration DNase-protection assay for batch 2 Anellovector Ring19-fCMV-eGFP material, showing absence of Ring19 WT viral genomes.

[1492] FIG. 40 depicts coomassie staining on batch 2 Anellovector Ring19-fCMV-eGFP material.

[1493] FIG. 41 depicts qPCR data in plots showing the presence of Ring19-eGFP DNA in the PEC 21 (top panel) and 49 (bottom panel) days after viral transduction.

[1494] FIG. 42 depicts qPCR data in plots showing Ring19-eGFP DNA in the retina 21 (top panel) and 49 (bottom panel) days after viral transduction, showing persistence of viral infection.

[1495] FIG. 43 depicts qPCR data for WT Ring19 DNA in the PEC 21 (top panel) and 49 (bottom panel) days after viral transduction, showing the lack of WT Ring19 DNA.

[1496] FIG. 44 depicts qPCR data for WT Ring19 DNA in the retina 21 (top panel) and 49 (bottom panel) days after viral transduction, showing the lack of WT Ring19 DNA.

[1497] FIG. 45 depicts plots showing RNA copies of eGFP detected by RT-qPCR in the PEC (top panel) and the retina (bottom panel), showing successful eGFP transduction by Ring19-eGFP in experiment 1.

[1498] FIG. 46 depicts plots showing RNA copies of eGFP detected by RT-ddPCR in the PEC (top panel) and the retina (bottom panel), showing successful transduction by Ring19-eGFP in experiment 1.

[1499] FIG. 47 depicts results from experiment 2 showing eGFP mRNA expression in the PEC by RT-qPCR (top panel first page) and RT-ddPCR (bottom panel first page) and eGFP mRNA expression in the retina by RT-qPCR (top panel second page) and RT-ddPCR (bottom panel second page) 21 days after viral transduction. These data indicate successful infection of eye tissue by Ring19-eGFP.

[1500] FIG. 48 depicts RT-qPCR (top panel) and RT-ddPCR (bottom panel) data showing eGFP mRNA expression in the PEC 49 days after viral transduction, showing infection by Ring19-eGFP lasts at least 49 days after transduction.

[1501] FIG. 49 depicts RT-qPCR (top panel) and RT-ddPCR (bottom panel) data showing eGFP mRNA expression in the retina 49 days after viral transduction.

[1502] FIG. 50 depicts fluorescent imaging of flatmount preparations of mouse PEC. The top row shows GFP expression (A), red blood cell autofluorescence in the Texas red channel (B), and a merge (C) for PBS treated negative control cells. The second row shows GFP expression (D), red blood cell autofluorescence in the Texas red channel (E), and a merge (F) for Ring19-eGFP infected cells. The third row shows GFP expression (G), red blood cell autofluorescence in the Texas red channel (H), and a merge (I) for dose matched AAV2-eGFP infected cells. The bottom row shows GFP expression (J), red blood cell autofluorescence in the Texas red channel (K), and a merge (L) for high dose AAV2-eGFP infected cells. Arrows indicate GFP-expressing cells.

[1503] FIG. 51 is a transmission electron microscopy (TEM) image of Ring19-eGFP virus showing successful virus assembly.

[1504] FIG. 52 depicts a retinal pigmented epithelial (RPE) cell culture at day 5 showing cell growth and confluence.

[1505] FIG. 53 depicts an RPE cell culture and cells spun down at day 28 showing visible melanin granule formation in the cells.

[1506] FIG. 54 depicts an RPE cell culture showing nuclei and ZO-1 staining around the cell membrane, showing tight junction formation in cultured cells.

[1507] FIG. 55 depicts a schematic of an ELISA assay against VEGF (left panel) and a bar graph that shows VEGF protein expression in RPE cell culture (right panel).

[1508] FIG. 56 shows human RPE cells transduced with Ring19-eGFP with phase imaging of cells (top panel), a single GFP positive cell in the middle of the field of view (middle panel), and merged phase and GFP images (bottompanel).

[1509] FIG. 57 shows human RPE cells transduced with AAV2-eGFP with phase imaging of cells (top panel), several GFP positive cells (middle panel), and merged phase and GFP images (bottom panel).

[1510] FIG. 58 depicts fluorescence microscopy images of RPE cells transduced by Ring19-eGFP showing GFP expression (top left panel), immunostaining for GFP (top right panel), Hoechst DNA staining (bottom left panel), and a merged image of all three channels (bottom right panel) at 20× magnification. GFP expression overlaps with staining for GFP in a cell in the bottom left of the image and a cell in the top left of the image, indicating successful transduction of eGFP.

[1511] FIG. 59 depicts fluorescence microscopy for Hoechst, a DNA stain (top left panel), GFP expression (top right panel), GFP immunostaining (bottom left panel), and all three channels merged (bottom right panel) in Ring19eGFP infected RPE cells at 40× magnification.

[1512] FIG. 60 is fluorescence microscopy images of RPE cells transduced by AAV2-eGFP showing GFP expression (top left panel), immunostaining for GFP (top right panel), Hoechst DNA staining (bottom left panel), and a merged image of all three channels (bottom right panel) at 20× magnification. GFP expression overlaps with staining for GFP in several cells, indicating successful transduction of eGFP.

[1513] FIG. 61 depicts fluorescence microscopy for Hoechst, a DNA stain (top left panel), GFP expression (top right panel), GFP immunostaining (bottom left panel), and all three channels merged (bottom right panel) in dose matched AAV2-eGFP infected RPE cells at 40× magnification.

[1514] FIG. 62 is fluorescence microscopy images of RPE cells not treated with virus showing GFP expression (top left), immunostaining for GFP (top right), Hoechst DNA staining (bottom left), and a merged image of all three channels (bottom right). There is no cell with GFP expression overlapping with staining for GFP, as expected for this negative control.

[1515] FIGS. 63A-63D depict four plots of qPCR assays for eGFP DNA in the posterior eye cup (PEC) (A) and the retina (B), and WT Ring19 DNA in the PEC (C) and retina (D), 21 days after viral transduction with R19-eGFP (LD), R19-eGFP (HD), AAV2-eGFP (LD), and AAV2-eGFP (HD), and a PBS negative control. Each dot represents one eye. N=3/group.

[1516] FIGS. 64A-64D depict plots showing eGFP mRNA expression in the PEC by RT-qPCR (A) and RT-ddPCR (B) and eGFP mRNA expression in the retina by RT-qPCR (C) and RT-ddPCR (D) 21 days after viral transduction with R19-eGFP (LD), R19-eGFP (HD), AAV2-eGFP (LD), and AAV2-eGFP (HD), and a PBS negative control. The two highest eGFP-expressing samples as determined by RT-qPCR were rerun with RT-ddPCR to confirm eGFP expression. N=5 for RT-qPCR and n=5 for RT-ddPCR.

[1517] FIG. 65 depicts fluorescent imaging of flatmount preparations of mouse PEC. The top row shows GFP expression (A), red blood cell autofluorescence in the Texas red channel (B), and a merge (C) for PBS treated negative control cells. The second row shows GFP expression (D), red blood cell autofluorescence in the Texas red channel (E), and a merge (F) for low dose (LD) Ring19-eGFP infected cells. The third row shows GFP expression (G), red blood cell autofluorescence in the Texas red channel (H), and a merge (I) for high dose (HD) Ring19-eGFP infected cells. The fourth row shows GFP expression (J), red blood cell autofluorescence in the Texas red channel (K), and a merge (L) for low dose (LD) AAV2-eGFP infected cells. The bottom row shows GFP expression (M), red blood cell autofluorescence in the Texas red channel (N), and a merge (O) for high dose (HD) AAV2-eGFP infected cells. Arrows indicate GFP-expressing cells. N=3/group.

[1518] FIG. 66 is an illustration of an exemplary recombinase based system for Anelloviridae family vector genetic element production. A minimum of two plasmids are used in the system. A first plasmid contains a promoter that drives expression of a site-specific recombinase. A second plasmid contains a transgene cassette comprising non-coding regions of an Anelloviridae family viral genome, promoter transgene, and terminator elements. The transgene cassette is flanked by recombinase recognition sites. The recombinase expressed from the first plasmid then recognizes the recognition sequences at either end of the cassette and initiates a recombination event, resulting in the production of a circular genetic element construct comprising the nucleic acid sequence of the genetic element of the desired Anelloviridae family vector.

[1519] FIG. 67 is an illustration of an exemplary Cre-based three-plasmid system that can be used to produce packaged Anelloviridae family vector particles. A first plasmid contains recombinase recognition sites (e.g. loxP sites), flanking an expression cassette with a non-coding region (or a portion thereof) of an Anelloviridae family virus, promoter, transgene, and terminator element. A second plasmid is an expression plasmid that provides the recombinase (e.g. Cre). The two plasmids together can result in production of a circular genetic element construct containing the sequence of the genetic element of the desired Anelloviridae family vector through expression of a Cre recombinase that initiates a recombination event in the first plasmid. A third plasmid is a self-replicating rescue (SRR) plasmid containing genes encoding Anelloviridae family viral proteins that drive, e.g., replication and packaging of the circular genomic elements, e.g. ORF1, ORF2, and/or ORF3. In some embodiments, the SRR plasmid also contains an SV40 origin of replication and optionally further expresses an SV40 large T antigen (eg. from an IRES sequence), allowing the SRR plasmid to be self-replicating and express the Anelloviridae family viral proteins at high levels. In some instances, a cell containing all three-plasmids produces packaged Anelloviridae family vector particles containing the desired vector sequence.

[1520] FIG. 68 depicts qPCR data in a bar plot comparing the amount of Ring19-eGFP genomes to wild type (WT) Ring19 genomes, showing an increase in Ring19-eGFP genome copies in the exemplary three-plasmid system compared to transfection of only a vector plasmid.

[1521] FIG. 69 is a bar graph showing the fold change in Ring19-eGFP genomes when transfecting different ratios of the three plasmids (as indicated) compared to an initial plasmid ratio of 50 ug:50 ug:50 ug.

[1522] FIG. 70 is an illustration of an exemplary Bxb1-based three-plasmid system that can be used to produce packaged Anelloviridae family vector particles. A first plasmid contains recombinase recognition sites, e.g. attP and attB, flanking an expression cassette with a non-coding region (or a portion thereof) of an Anelloviridae family virus, promoter, transgene, and terminator element. A second plasmid is an expression plasmid that provides the recombinase, e.g. Bxb1. The two plasmids together can result in production of a circular genetic element construct containing the nucleic acid sequence of the genetic element of a desired Anelloviridae family vector through expression of a Bxb1 recombinase that initiates a recombination even in the first plasmid. A third plasmid is a self-replicating rescue (SRR) plasmid encoding Anelloviridae family viral proteins that drive, e.g., replication and packaging of the circular genomic elements, e.g., ORF1, ORF2, and ORF3. In some embodiments, the SRR plasmid also contains an SV40 origin of replication and optionally further expresses an SV40 large T antigen (eg. from an IRES sequence), allowing the SRR plasmid to be self-replicating and express the Anelloviridae family viral proteins at high levels. A cell containing all three plasmids can, in some instances, produce packaged Anelloviridae family vector particles containing the desired vector sequence.

[1523] FIG. 71 depicts fluorescence microscopy images of MOLT-4 cells transfected with a plasmid with a CMV promoter-eGFP transgene expression cassette flanked by loxP sites (pFlox) (top left), a plasmid with a UbC promoter-eGFP transgene expression cassette flanked by attP and attB sites (pBox) (top center), the same pFlox plasmid in combination with a Ring19 SRR plasmid (top right), the same pBox plasmid with a Ring19 SRR (bottom left), mutated pBox2 plasmid with a Ring19 SRR (bottom center), and mutated pBox3 plasmid with a Ring19 SRR (bottom right).

[1524] FIG. 72 is a bar graph showing log-scale qPCR data for Ring19-eGFP and WT Ring19 genome copies produced from cells transfected with the pFlox vector with CMV as the eGFP transgene promoter or the pBox vectors (pBoxl, pBox2, and pBox3) with UbC as the eGFP transgene promoter, alone or together with a Ring19 self-replicating rescue plasmid (SRR) and a Cre or Bxb1-expressing plasmid.

[1525] FIGS. 73A-73B is a comparison of different promoters driving the eGFP payload. FIG. B16A illustrates the eGFP::WPRE::bGH-pA transgene remaining constant while the promoters (CMV, sCAG, CBA, and CBh) were swapped in each of the pBox and pFlox-based plasmids. FIG. B16B is a bar graph depicting the results of qPCR for Ring19-eGFP genetic material produced in vector genomes (vgs) per liter using the different promoters. As a negative control, MOLT-4 cells were transfected with a CMV-eGFP vector alone. For test samples, MOLT-4 cells were transfected with a CMV-eGFP vector and a Ring19 SRR, an sCAG-eGFP vector and a Ring19 SRR, a CBA-eGFP vector and a Ring19 SRR, or a CBh-eGFP vector and a Ring19 SRR. For pFlox-based plasmids, a plasmid encoding Cre was also transfected (pRTx-2848) and for pBox-based plasmids, a plasmid encoding Bxb1 was also transfected (pRTx-3542).

[1526] FIG. 74 is an exemplary schematic showing the addition of a separate origin of replication to the vector transgene cassette of an exemplary vector construct (top). In some embodiments, the origin of replication (depicted as a blue box) can be derived from AAV, PCV, SV40, or other viral origins of replication. Also shown is an exemplary self-replicating rescue (SRR) plasmid including promoter driven Anelloviridae family viral ORF coding sequences, SV40 Large T antigen, and SV40 origin of replication (middle), which can be used to provide viral proteins as described herein. The SRR plasmid can, in some instances, be introduced alongside a third plasmid comprising an expression cassette encoding replication initiator proteins for the selected origin of replication, e.g., to drive replication of the transgene plasmid. Together with expression of a recombinase, this system can be used to produce packaged Anelloviridae family vector particles containing the desired transgene cassette (right).

[1527] FIG. 75 is a schematic showing an exemplary two plasmid system for Anelloviridae family vector particle production. In this version, a first plasmid contains recombinase recognition sites, e.g. loxP sites, flanking an expression cassette comprising a non-coding region of an Anelloviridae family virus (or a portion thereof) followed by a promoter, transgene, and terminator element. This first plasmid also contains an expression cassette encoding the recombinase itself, e.g. Cre. Transfection of this plasmid can result in expression of the recombinase from the plasmid, which can then recombine the plasmid (or copies thereof) to produce a circular genetic element construct comprising the sequence of the genetic element of the desired Anelloviridae family vector. A second plasmid is a self-replicating rescue (SRR) plasmid encoding Anelloviridae family viral proteins that drive, e.g., replication and packaging of the circular genomic elements, e.g. ORF1, ORF2, and ORF3. In some embodiments, the SRR plasmid also contains an SV40 origin of replication and optionally further expresses an SV40 large T antigen (eg. from an IRES sequence), allowing the SRR plasmid to be self-replicating and express the Anelloviridae family viral proteins at high levels. A cell containing the first and second plasmids can thus produces packaged Anelloviridae family vector particles.

[1528] FIG. 76 is a schematic showing an exemplary two-plasmid system for production of Anelloviridae family vector particles using Bxb1 recombinase. In this version, a first plasmid contains recombinase recognition sites, e.g. attP and attB, flanking an expression cassette comprising a non-coding region of an Anelloviridae family virus (or a portion thereof), followed by a promoter, transgene, and terminator element. This first plasmid also contains an expression cassette encoding the corresponding recombinase, e.g., Bxb1. Transfection of this plasmid can result in expression of the recombinase from the plasmid, which can then recombine the plasmid (or copies thereof) to produce a circular genetic element comprising the sequence of the genetic element of the desired Anelloviridae family vector. A second plasmid is a self-replicating rescue (SRR) plasmid encoding Anelloviridae family viral proteins that drive, e.g., replication and packaging of the circular genomic elements, e.g. ORF1, ORF2, and ORF3. In some embodiments, the SRR plasmid also contains an SV40 origin of replication and optionally further expresses an SV40 large T antigen (eg. from an IRES sequence), allowing the SRR plasmid to be self-replicating and express the Anelloviridae family viral proteins at high levels. A cell containing both plasmids can thus produce packaged Anelloviridae family vector particles.

[1529] FIG. 77 is an illustration depicting the production of an Anelloviridae family vector particle in a mammalian cell (e.g., a MOLT-4 cell) comprising a minicircle containing the Anelloviridae family vector genetic element sequence, as well as an SRR plasmid encoding Anelloviridae family viral proteins, as described herein. Anelloviridae family vector particles containing genetic elements are made within the cell and can be isolated therefrom.

[1530] FIG. 78 is an illustration showing an exemplary process of nicking circular double stranded DNA (cdsDNA) at one or more sites (eg. five optimally spaced sites) and then using gel separation or exonuclease digest to produce circular single stranded DNA. The cdsDNA is nicked using an enzyme, e.g. Nt.BbvCI. The nicked DNA is then run on a gel to separate the smaller nicked fragments from the larger intact circular single stranded DNA. Separately, the nicked DNA can also be treated with an exonuclease, e.g. T7, to digest the nicked strand and produce circular single stranded DNA.

[1531] FIG. 79 is an illustration depicting an exemplary process for production of Anelloviridae family vector genetic element constructs (in the form of double-stranded DNA minicircles) in bacterial cells. Briefly, bacteria are transformed with a plasmid containing an Anelloviridae family vector genetic element sequence flanked by recombinase recognition sites, e.g., attP and attB sites as shown. A recombinase expressed by the bacterial strain (e.g., PhiC31) recombines the plasmid into a minicircle containing the Anelloviridae family vector genetic element sequence. The minicircle can be isolated from the bacterial cell and transfected into cells (e.g., MOLT-4 cells, 293 cells) with an SRR plasmid for production of Anelloviridae family vector particles or used in production of circular single stranded DNA (e.g., as described herein) for later encapsulation into Anelloviridae family vector particles.

[1532] FIG. 80 depicts a series of electrophoresis gels showing the isolation of minicircles from bacterial cells at various time scales after induction.

[1533] FIG. 81 is an illustration of an exemplary self-replicating rescue (SRR) plasmid comprising three expression cassettes. In the first cassette, a promoter drives expression of ORF1, ORF2, and ORF3 proteins, as well as SV40 Large T antigen via an internal ribosome entry site (IRES). The first cassette also includes an SV40 origin of replication. This cassette ensures that the SRR is self-replicating and provides the viral packaging proteins. A second cassette includes a promoter driving expression of a recombinase. A third cassette includes a promoter driving expression of anelloviral ORF1 separately from the first cassette.

[1534] FIG. 82 is an illustration depicting an exemplary self-replicating rescue (SRR) plasmid comprising four expression cassettes. In the first cassette, a promoter drives expression of ORF1, ORF2, and ORF3 proteins. In a second cassette, a promoter drives expression SV40 Large T antigen; this cassette also includes an SV40 origin of replication. A third cassette includes a promoter driving expression of a recombinase. A fourth cassette includes a promoter driving expression of anelloviral ORF1 separately from the first cassette.

[1535] FIG. 83 is an illustration depicting various arrangements of expression cassettes that may be included in a self-replicating rescue (SRR) plasmid as described herein. In some instances, 1, 2, 3, 4, or more cassettes may be included on the SRR plasmid in any order, provided, the SRRs contain at least one cassette expressing an SV40 Large T antigen and SV40 origin of replication, either through eg IRES or as a standalone cassette expressed from a promoter. In an example, a full ORF cassette can be included. In some instances, a mutant ORF cassette, for example with a stop codon in ORF1, can be included, with a separate expression cassette expressing ORF1. In some instances, a single ORF or recombinase cassette, for example, encoding an ORF1 protein or a recombinase, can be included. The direction/orientation of cassettes may also be varied.

[1536] FIG. 84 shows a gel of a 1 kb plus DNA ladder (lane 1), 400 ng of untreated DNA (lane 2), 400 ng of nicked DNA (lane 3), 1 μg of nicked and exonuclease-treated, unpurified DNA (lane 4), and 1 μg of nicked and exonuclease-treated, purified DNA (lane 5). The arrow indicates the expected banding position for the cssDNA.

[1537] FIG. 85 shows a gel of a 1 kb plus DNA ladder (lane 1), untreated DNA (lane 2), nicked DNA (lane 3), nicked and exonuclease-treated, unpurified DNA (lane 4), and nicked and exonuclease-treated, purified DNA (lane 5), all loaded with 500 ng of DNA. The arrow indicates the expected banding position for the cssDNA.

[1538] FIG. 86 shows the DNAse-protected viral genomes per liter (vgs/L) produced from MOLT-4 cells transfected with the genetic element construct encoding eGFP alone (“vector alone”; condition 1); the genetic element construct encoding eGFP, iCre-encoding plasmid, and the Ring19 SRR with ORF1 expression knocked out by a premature stop codo in its coding sequence (“vector+R19ORF1KO”; condition 2); the genetic element construct encoding eGFP, iCre-encoding plasmid, and Ring19 SRR (“vector+R19 SRR”; condition 3); the genetic element construct encoding eGFP, iCre-encoding plasmid, and Ring19 SRR which has the intron in the Ring19 NCR deleted but retains the remainder of the NCR and the native kozak sequence (“vector+R19Δintron1 SRR”; condition 4); and the genetic element construct encoding eGFP, iCre-encoding plasmid, and Ring19 SRR which contains the native kozak sequence but does not contain any other portion of the Ring19 NCR (“vector+R19Δexon1Δintron1 SRR”; condition 5). DNAse-protected viral genomes were detected with either eGFP or wild type Ring19—directed primers and probes.

[1539] FIG. 87A is a Western blot probed with an anti-Ring19 ORF1 antibody. Lane 1 is a protein ladder; lane 2 is from cells transfected with pRTx-3525 (“Ring19 full SRR”); lane 3 is from cells transfected with pRTx-3775 (“Ring19 ORF1 KO”); lane 4 is from cells transfected with pRTx-4534 (“Ring19 ORF1/1”); and lane 5 is an untransfected control.

[1540] FIG. 87B is a Western blot probed with an anti-Ring19 ORF2 antibody. Lane 1 is a protein ladder; lane 2 is from cells transfected with pRTx-3525 (“Ring19 full SRR”); lane 3 is from cells transfected with pRTx-3775 (“Ring19 ORF1 KO”); lane 4 is from cells transfected with pRTx-4534 (“Ring19 ORF1/1”); and lane 5 is an untransfected control.

[1541] FIG. 87C is a Western blot probed with an anti-Ring2 ORF1 antibody. Lane 1 is a protein ladder; lane 2 is from cells transfected with pRTx-3853 (“Ring2 full SRR”); lane 3 is from cells transfected with pRTx-3776 (“Ring2 ORF1 KO”); lane 4 is from cells transfected with pRTx-4463 (“Ring2 ORF1/1”); and lane 5 is untransfected control.

[1542] FIG. 87D is a Western blot probed with an anti-Ring2 ORF2 antibody. Lane 1 is a protein ladder; lane 2 is from cells transfected with pRTx-3853 (“Ring2 full SRR”); lane 3 is from cells transfected with pRTx-3776 (“Ring2 ORF1 KO”); lane 4 is from cells transfected with pRTx-4463 (“Ring2 ORF1/1”); and lane 5 is untransfected control.

[1543] FIG. 88 is a plot depicting the number of viral genomes detected by qPCR per liter of transfected cell culture. Cells were transfected with three plasmids: a self-replicating rescue (SRR) plasmid expressing ORF1 from Ring19, Ring2, Ring9, Ring25, Ring161, YYBYFW, or Ring34, a Cre expression plasmid, and a Ring19 genetic element construct. One control group was transfected with the Ring19 genetic element construct alone. Anellovectors with Ring19 genetic elements were produced at a higher level when co-transfected with SRRs from any of the tested Anellovectors than when the Ring19 genetic element construct is transfected alone.

[1544] FIG. 89 is a plot depicting the number of viral genomes detected by qPCR per liter of transfected cell culture. Cells were transfected with the Ring19 genetic element construct alone, the Ring19 genetic element construct, a Cre expression plasmid, and a Ring10 SRR, or the Ring19 genetic element construct, a Cre expression plasmid, and a Ring19 SRR. Anellovectors with Ring19 genetic elements were produced at a higher level when co-transfected with Ring10 or Ring19 SRR than when transfected alone.

[1545] FIG. 90 is a plot depicting the number of DNase-protected eGFP copies per fraction of cell lysate after an iodixanol linear gradient for two Anellovectors, Ring19_fCMV_eGFP (an Anellovector with Ring19 ORF1 packaging the Ring19-eGFP genetic element) and Ring2_fCMV_eGFP (an Anellovector with Ring2 ORF1 packaging the Ring19-eGFP genetic element).

[1546] FIG. 91 is a plot depicting the number of DNase-protected eGFP copies before and after concentration of viral material for two Anellovectors, Ring19_fCMV_eGFP (an Anellovector with Ring19 ORF1 packaging the Ring19-eGFP genetic element) and Ring2_fCMV_eGFP (an Anellovector with Ring2 ORF1 packaging the Ring19-eGFP genetic element).

[1547] FIG. 92 depicts a gel showing a Coomassie Stain on Ring19_fCMV_eGFP (an Anellovector with Ring19 ORF1 packaging the Ring19-eGFP genetic element) Material.

[1548] FIG. 93 depicts a gel showing a Coomassie Stain on Ring2_fCMV_eGFP (an Anellovector with Ring2 ORF1 packaging the Ring19-eGFP genetic element) Material.

[1549] FIGS. 94A-94F depict plots showing the quantification of eGFP in the posterior eye cup (FIG. 94A) and the retina (FIG. 94B), wild-type (WT) Ring2 (R2) genetic material in the posterior eye cup (FIG. 94C) and the retina (FIG. 94D), for wild-type (WT) Ring19 (R19) genetic material in the posterior eye cup (FIG. 94E) and the retina (FIG. 94F) by qPCR. Each dot represents one eye. WT Ring2 and WT Ring19 were not detected in either the posterior eye cup or the retina. n=3 eyes per group.

[1550] FIGS. 95A-95D are plots showing quantification of eGFP mRNA in the posterior eye cup by RT-qPCR (FIG. 95A) and RT-ddPCR (FIG. 95B), and quantification of eGFP mRNA in the retina by RT-qPCR (FIG. 95C) and RT-ddPCR (FIG. 95D). Each dot represents one eye. n=5 eyes per group.

[1551] FIGS. 96A-96L are representative fluorescence microscopy images of posterior eye cup tissue flatmounts. FIGS. 96A-96C show the eGFP channel, Texas red channel, and overlap of the two channels for the PBS control group, respectively. FIGS. 96D-96F show the eGFP channel, Texas red channel, and overlap of the two channels for the R2-eGFP group (Ring2 ORF1 packaging the Ring19-eGFP genetic element), respectively. FIGS. 96G-96I show the eGFP channel, Texas red channel, and overlap of the two channels for the R19-eGFP group (Ring19 ORF1 packaging the Ring19-eGFP genetic element), respectively. FIGS. 96J-96L show the eGFP channel, Texas red channel, and overlap of the two channels for the dose-matched AAV2-eGFP group, respectively. White arrows show eGFP positive cells. n=3 per group.

### DETAILED DESCRIPTION OF CERTAIN EMBODIMENTS

### Definitions

[1552] The present invention will be described with respect to particular embodiments and with reference to certain figures, but the invention is not limited thereto but only by the claims. Terms as set forth hereinafter are generally to be understood in their common sense unless indicated otherwise.

[1553] Where the term “comprising” is used in the present description and claims, it does not exclude other elements. For the purposes of the present invention, the term “consisting of” is considered to be a preferred embodiment of the term “comprising of”. If hereinafter a group is defined to comprise at least a certain number of embodiments, this is to be understood to preferably also disclose a group which consists only of these embodiments.

[1554] Where an indefinite or definite article is used when referring to a singular noun, e.g. “a”, “an” or “the”, this includes a plural of that noun unless something else is specifically stated.

[1555] The wording “compound, composition, product, etc. for treating, modulating, etc.” is to be understood to refer a compound, composition, product, etc. per se which is suitable for the indicated purposes of treating, modulating, etc. The wording “compound, composition, product, etc. for treating, modulating, etc.” additionally discloses that, as an embodiment, such compound, composition, product, etc. is for use in treating, modulating, etc.

[1556] The wording “compound, composition, product, etc. for use in . . . ”, “use of a compound, composition, product, etc in the manufacture of a medicament, pharmaceutical composition, veterinary composition, diagnostic composition, etc. for . . . ”, or “compound, composition, product, etc. for use as a medicament . . . ” indicates that such compounds, compositions, products, etc. are to be used in therapeutic methods which may be practiced on the human or animal body. They are considered as an equivalent disclosure of embodiments and claims pertaining to methods of treatment, etc. If an embodiment or a claim thus refers to “a compound for use in treating a human or animal being suspected to suffer from a disease”, this is considered to be also a disclosure of a “use of a compound in the manufacture of a medicament for treating a human or animal being suspected to suffer from a disease” or a “method of treatment by administering a compound to a human or animal being suspected to suffer from a disease”. The wording “compound, composition, product, etc. for treating, modulating, etc.” is to be understood to refer a compound, composition, product, etc. per se which is suitable for the indicated purposes of treating, modulating, etc.

[1557] If hereinafter examples of a term, value, number, etc. are provided in parentheses, this is to be understood as an indication that the examples mentioned in the parentheses can constitute an embodiment. For example, if it is stated that “in embodiments, the nucleic acid molecule comprises a nucleic acid sequence having at least about 70%, 75%, 80%, 85%, 90%, 95%, 96%, 97%, 98%, 99%, or 100% sequence identity to the Anellovirus ORF1-encoding nucleotide sequence of Table 1 (e.g., nucleotides 571-2613 of the nucleic acid sequence of Table 1)”, then some embodiments relate to nucleic acid molecules comprising a nucleic acid sequence having at least about 70%, 75%, 80%, 85%, 90%, 95%, 96%, 97%, 98%, 99%, or 100% sequence identity to nucleotides 571-2613 of the nucleic acid sequence of Table 1.

[1558] As used herein, the term “Anelloviridae family vector” refers to a vehicle derived from or similar to a virus of the Anelloviridae family (e.g., an Alphatorquevirus, Betatorquevirus, Gammatorquevirus, or chicken anemia virus), wherein the vehicle comprises a genetic element enclosed in a proteinaceous exterior (e.g., the genetic element is substantially protected from digestion with DNAse I by a proteinaceous exterior). In some embodiments, an Anelloviridae family vector comprises a genetic element derived from or highly similar to (e.g., at least 85%, 90%, 95%, 96%, 97%, 98%, 99%, or 100% identical to) that of an Alphatorquevirus, Betatorquevirus, Gammatorquevirus, or chicken anemia virus (CAV). In some embodiments, an Anelloviridae family vector comprises a proteinaceous exterior comprising a protein derived from or similar to (e.g., at least 50%, 60%, 70%, 75%, 80%, 85%, 90%, 95%, 96%, 97%, 98%, 99%, or 100% identical to) a capsid protein of an Alphatorquevirus, Betatorquevirus, Gammatorquevirus, or chicken anemia virus (e.g., an Alphatorquevirus ORF1, Betatorquevirus ORF1, Gammatorquevirus ORF1, or CAV VP1). In some embodiments, enclosed within a proteinaceous exterior encompasses 100% coverage by a proteinaceous exterior, as well as less than 100% coverage, e.g., 95%, 90%, 85%, 80%, 70%, 60%, 50% or less. For example, gaps or discontinuities (e.g., that render the proteinaceous exterior permeable to water, ions, peptides, or small molecules) may be present in the proteinaceous exterior, so long as the genetic element is retained in the proteinaceous exterior or protected from digestion with DNAse I, e.g., prior to entry into a host cell. In some embodiments, the Anelloviridae family vector is purified, e.g., it is separated from its original source and/or substantially free (>50%, >60%, >70%, >80%, >90%) of other components. In some embodiments, the Anelloviridae family vector is capable of introducing the genetic element into a target cell (e.g., via infection). In some embodiments, the Anelloviridae family vector is an infective synthetic viral particle.

[1559] As used herein, the term “anellovector” refers to a vehicle comprising a genetic element, e.g., an episome, e.g., circular DNA, enclosed in a proteinaceous exterior. A “synthetic anellovector,” as used herein, generally refers to an anellovector that is not naturally occurring, e.g., has a sequence that is different relative to a wild-type virus (e.g., a wild-type Anellovirus as described herein). As used herein with respect to components or elements of an Anelloviridae family virus, the term “wild-type” generally refers to a naturally occurring version of the component or element (e.g., a genome sequence, coding sequence, non-coding element, polypeptide, or NCR sequence found in a naturally occurring Anelloviridae family virus, e.g., as described herein). In some embodiments, the proteinaceous exterior comprises an ORF1 molecule (e.g., an Anellovirus ORF1 protein), e.g., as described herein. In some embodiments, the proteinaceous exterior comprises a plurality of ORF1 molecules (e.g., an Anellovirus ORF1 protein), e.g., at least about 40, 45, 50, 55, 60, 65, or 70 ORF1 molecules. In some embodiments, the synthetic anellovector is engineered or recombinant, e.g., comprises a genetic element that comprises a difference or modification relative to a wild-type viral genome (e.g., a wild-type Anellovirus genome as described herein). In some embodiments, enclosed within a proteinaceous exterior encompasses 100% coverage by a proteinaceous exterior, as well as less than 100% coverage, e.g., 95%, 90%, 85%, 80%, 70%, 60%, 50% or less. For example, gaps or discontinuities (e.g., that render the proteinaceous exterior permeable to water, ions, peptides, or small molecules) may be present in the proteinaceous exterior, so long as the genetic element is retained in the proteinaceous exterior, e.g., prior to entry into a host cell. In some embodiments, the anellovector is purified, e.g., it is separated from its original source and/or substantially free (>50%, >60%, >70%, >80%, >90%) of other components.

[1560] An anellovector may, in some embodiments, comprise a nucleic acid vector that comprises sufficient nucleic acid sequence derived from or highly similar to (e.g., at least 85%, 90%, 95%, 96%, 97%, 98%, 99%, or 100% identical to) an Anellovirus genome sequence or a contiguous portion thereof to allow packaging into a proteinaceous exterior (e.g., a capsid), and further comprises a heterologous sequence. In some embodiments, the nucleic acid vector is a viral vector or a naked nucleic acid. In some embodiments, the nucleic acid vector comprises at least about 50, 60, 70, 71, 72, 73, 74, 75, 80, 90, 100, 150, 200, 300, 400, 500, 600, 700, 800, 900, 1000, 1100, 1200, 1300, 1400, 1500, 1600, 1700, 1800, 1900, 2000, 2500, 3000, or 3500 consecutive nucleotides of a native Anellovirus sequence or a sequence highly similar (e.g., at least 85%, 90%, 95%, 96%, 97%, 98%, 99%, or 100% identical) thereto. In some embodiments, the anellovector further comprises one or more of an Anellovirus ORF1, ORF2, or ORF3. In some embodiments, the heterologous sequence comprises a multiple cloning site, comprises a heterologous promoter, comprises a coding region for a therapeutic protein, or encodes a therapeutic nucleic acid. In some embodiments, the capsid is a wild-type Anellovirus capsid. In embodiments, an anellovector comprises a genetic element described herein, e.g., comprises a genetic element comprising a promoter, a sequence encoding a therapeutic effector, and a capsid binding sequence.

[1561] The term “Anelloviridae family vector genetic element sequence,” as used herein, refers to a sequence of nucleotides (e.g., within a nucleic acid molecule, which in some instances may comprise additional sequences) having the nucleic acid sequence of the genetic element of an Anelloviridae family vector. Likewise, as used herein, “Anellovector genetic element sequence” refers to a sequence of nucleotides (e.g., within a nucleic acid molecule, which in some instances may comprise additional sequences) having the nucleic acid sequence of the genetic element of an Anellovector. Generally, an Anelloviridae family vector (e.g., Anellovector) genetic element sequence can, if excised from any surrounding nucleic acid sequence and converted to a single-stranded circular DNA form, be encapsulated within a proteinaceous exterior comprising an ORF1 molecule to form an Anelloviridae family vector (e.g., Anellovector) as described herein. In some embodiments, an Anelloviridae family vector (e.g., Anellovector) genetic element sequence is present in a single-stranded DNA, such as a genetic element of an Anelloviridae family vector (e.g., Anellovector) as described herein. In some embodiments, an Anelloviridae family vector (e.g., Anellovector) genetic element sequence is present in a double-stranded DNA, such as a plasmid or minicircle, e.g., as described herein. In some embodiments, an Anelloviridae family vector (e.g., Anellovector) genetic element sequence is present as a positive strand sequence. In some embodiments, an Anelloviridae family vector (e.g., Anellovector) genetic element sequence is present as a negative strand sequence.

[1562] As used herein, the term “anelloVLP” refers to a vehicle (e.g., a virus-like particle) comprising a proteinaceous exterior and an effector (e.g., an exogenous effector). In some instances, an anelloVLP does not comprise a substantial amount of a nucleic acid. In some embodiments, the proteinaceous exterior comprises an ORF1 molecule (e.g., an Anellovirus ORF1 protein), e.g., as described herein. In some embodiments, the proteinaceous exterior comprises a plurality of ORF1 molecules (e.g., an Anellovirus ORF1 protein), e.g., at least about 40, 45, 50, 55, 60, 65, or 70 ORF1 molecules. In some embodiments, the effector is enclosed in the proteinaceous exterior. In some embodiments, the effector is on the surface of the proteinaceous exterior (e.g., comprised in a surface moiety as described herein). In some embodiments, the anelloVLP does not comprise a polynucleotide of greater than 50, 100, 150, 200, 300, 400, 500, 600, 700, 800, 900, 1000, 1100, 1200, 1300, 1400, 1500, 1600, 1700, 1800, 1900, or 2000 nucleotides in length. In some embodiments, the anelloVLP does not comprise a polynucleotide comprising an Anellovirus 5′ UTR or Anellovirus origin of replication. In some embodiments, the anelloVLP does not comprise a polynucleotide comprising any contiguous nucleic acid sequences of at least 50, 100, 150, 200, 300, 400, 500, 600, 700, 800, 900, or 1000 nucleotides in length having least 75%, 80%, 85%, 90%, 95%, 96%, 97%, 98%, 99%, or 100% sequence identity to contiguous sequence in a wild-type Anellovirus genome (e.g., as described herein).

[1563] As used herein, the term “Anellovirus non-coding region (NCR)” refers to a sequence of an untranslated region of an Anellovirus genome sequence that extends from just upstream of the ORF2 start codon to the untranslated region of the Anellovirus genome sequence just downstream of the ORF3 stop codon in a circular genome. The Anellovirus NCR may comprise the “Anellovirus 5′ NCR sequence” and “Anellovirus 3′ NCR sequence.” In some embodiments, the Anellovirus NCR sequence is contiguous. In some embodiments, the Anellovirus NCR sequence is non-contiguous. In some embodiments, the portions of a non-contiguous Anellovirus NCR sequence are separated by a heterologous insertion (e.g., comprising a recombinase hybrid site, e.g., as described herein). In some embodiments, the Anellovirus NCR sequence comprises a sequence found in a wild-type Anellovirus, and in other embodiments, the Anellovirus NCR comprises one or more mutations relative to the closest Anellovirus sequence. In some embodiments, the Anellovirus NCR is comprised by a nucleic acid molecule that does not comprise Anellovirus ORF2 or ORF3 coding sequences. In some instances, the Anellovirus NCR refers to the sense strand, the antisense strand, or a double-stranded DNA comprising both the sense strand and antisense strands. In some instances, a listing of an Anellovirus NCR sequence herein can refer to the sequence listed and/or its reverse complement.

[1564] As used herein, the term “Anellovirus 5′ NCR” refers to a sequence of an untranslated region of an Anellovirus genome sequence that extends from just upstream of the ORF2 start codon through the 5′ UTR conserved domain to the Anellovirus 3′ NCR sequence, and sequences with homology thereto. In some embodiments, an Anellovirus 5′ NCR sequence comprises origin of replication activity. In some embodiments, the Anellovirus 5′ NCR sequence is contiguous. In some embodiments, the Anellovirus 5′ NCR sequence is non-contiguous. In some embodiments, the portions of a non-contiguous Anellovirus 5′ NCR sequence are separated by a heterologous insertion (e.g., comprising a recombinase hybrid site, e.g., as described herein). In some embodiments, the Anellovirus 5′ NCR sequence comprises a sequence found in a wild-type Anellovirus, and in other embodiments, the Anellovirus 5′ NCR comprises one or more mutations relative to the closest Anellovirus sequence. In some instances, the Anellovirus 5′ NCR refers to the sense strand, the antisense strand, or a double-stranded DNA comprising both the sense strand and antisense strands. In some instances, a listing of an Anellovirus 5′ NCR sequence herein can refer to the sequence listed and/or its reverse complement. In a circular genetic element, the Anellovirus 5′ NCR and Anellovirus 3′ NCR may be directly adjacent to each other (e.g., to form an Anellovirus NCR). Exemplary dividing points between the Anellovirus 5′ NCR and the Anellovirus 3′ NCR are shown, e.g., as described herein.

[1565] As used herein, the term “Anellovirus 3′ NCR” refer to a sequence of an untranslated region of an Anellovirus genome sequence that extends from just downtream of the ORF3 stop codon through the GC-rich region to the Anellovirus 5′ NCR sequence, and sequences with homology thereto. In some embodiments, the Anellovirus 3′ NCR sequence is contiguous. In some embodiments, the Anellovirus 3′ NCR sequence is non-contiguous. In some embodiments, the portions of a non-contiguous Anellovirus 3′ NCR sequence are separated by a heterologous insertion (e.g., comprising a recombinase hybrid site, e.g., as described herein). In some embodiments, the Anellovirus 3′ NCR sequence comprises a sequence found in a wild-type Anellovirus, and in other embodiments, the Anellovirus 3′ NCR comprises one or more mutations relative to the closest Anellovirus sequence. In some instances, the Anellovirus 3′ NCR refers to the sense strand, the antisense strand, or a double-stranded DNA comprising both the sense strand and antisense strands. In some instances, a listing of an Anellovirus 3′ NCR sequence herein can refer to the sequence listed and/or its reverse complement.

[1566] As used herein, the term “Anellovirus GC-rich region” refers to a wild-type or engineered sequence that has an activity and a structural feature of a GC-rich region of a wild-type Anellovirus, or a functional fragment thereof. In some embodiments, the functional fragment has a length of at least 20, 30, 40, 50, 60, 70, 80, 90, or 100 nucleotides. Typically, the negative strand comprising the Anellovirus GC-rich region is packaged into a particle (e.g., an Anelloviridae family vector) as described herein. In some embodiments, the Anellovirus GC-rich region is a wild-type Anellovirus GC-rich region. In some embodiments, the Anellovirus GC-rich region is an engineered Anellovirus GC-rich region having a nucleic acid sequence with at least one difference relative to the closest wild-type Anellovirus GC-rich region sequence.

[1567] As used herein, the term “Anellovirus 5′ UTR conserved domain” refers to a wild-type or engineered sequence that has an activity and a structural feature of an Anellovirus 5′ UTR conserved domain of a wild-type Anellovirus, or a functional fragment thereof. In some embodiments, the functional fragment has a length of at least 15, 20, 30, 40, 50, 60, or 70 nucleotides. Typically, the negative strand comprising the Anellovirus 5′ UTR conserved domain is packaged into a particle (e.g., an Anelloviridae family vector) as described herein. In some embodiments, the Anellovirus 5′ UTR conserved domain is a wild-type Anellovirus 5′ UTR conserved domain. In some embodiments, the Anellovirus 5′ UTR conserved domain is an engineered Anellovirus 5′ UTR conserved domain having a nucleic acid sequence with at least one difference relative to the closest wild-type Anellovirus 5′ UTR conserved domain sequence.

[1568] As used herein, the term “antibody molecule” refers to a protein, e.g., an immunoglobulin chain or fragment thereof, comprising at least one immunoglobulin variable domain sequence. The term “antibody molecule” encompasses full-length antibodies and antibody fragments (e.g., scFvs). In some embodiments, an antibody molecule is a multispecific antibody molecule, e.g., the antibody molecule comprises a plurality of immunoglobulin variable domain sequences, wherein a first immunoglobulin variable domain sequence of the plurality has binding specificity for a first epitope and a second immunoglobulin variable domain sequence of the plurality has binding specificity for a second epitope. In embodiments, the multispecific antibody molecule is a bispecific antibody molecule. A bispecific antibody molecule is generally characterized by a first immunoglobulin variable domain sequence which has binding specificity for a first epitope and a second immunoglobulin variable domain sequence that has binding specificity for a second epitope.

[1569] The term “deletion,” as used herein with respect to an amino acid sequence or a nucleic acid sequence, refers to a portion of a sequence that is absent relative to a reference sequence. In some embodiments, a deletion is actively removed from the sequence (e.g., by cleavage and/or by an enzyme). In some embodiments, the sequence is produced de novo without the deletion sequence (e.g., a nucleic acid molecule synthesized de novo without the deletion sequence, a nucleic acid molecule produced using a template sequence in which the deletion sequence has already been removed, or a polypeptide translated from a nucleic acid sequence that does not encode the deletion sequence).

[1570] The term “disassembly,” as used herein with respect to a particle, such as a virus-like particle (VLP), or a proteinaceous exterior, refers to disassociating one or more components of the particle (e.g., a capsid protein, e.g., an ORF1 molecule as described herein) from the remainder of the particle. In some instances, disassembly of a particle (e.g., a VLP) comprises separating enough of the ORF1 molecules from each other that they no longer form a proteinaceous exterior. In some instances, a ORF1 molecules separated from each other via disassembly of a particle form capsomers (e.g., decameric capsomers), e.g., as described herein. In some embodiments, disassembly reduces the particle to individual monomers. In some embodiments, after disassembly, multimers, e.g., decamers, monomers, and/or pentamers remain. In some instances, disassembly comprises denaturation of protein complexes of the particle (e.g., breaking noncovalent bounds between ORF1 molecules in the proteinaceous exterior). In some instances, disassembly is driven by a denaturant as described herein

[1571] The term “in vitro assembly,” as used herein with respect to an Anelloviridae family vector (e.g., anellovector) or an anelloVLP, refers to the formation of a proteinaceous exterior comprising an ORF1 molecule, wherein the formation does not take place inside of a cell (e.g., takes place in a cell-free system such as a cell-free suspension, a lysate, or a supernatant). In some instances, in vitro assembly of an Anelloviridae family vector (e.g., anellovector) comprises enclosure, outside of a cell, of a genetic element (e.g., as described herein) within the proteinaceous exterior. In some instances, in vitro assembly of an anelloVLP comprises association, outside of a cell, of an effector (e.g., an exogenous effector, e.g., as described herein) with the proteinaceous exterior (e.g., enclosed within the proteinaceous exterior). In vitro assembly of a proteinaceous exterior may occur, in some instances, under conditions suitable for multimerization of a plurality of ORF1 molecules (e.g., nondenaturing conditions), e.g., to form a multimer of more than 10, 11, 12, 13, 14, 15, 16, 17, 18, 19, or 20 ORF1 molecules. In some instances, in vitro assembly results in the formation of a proteinaceous exterior comprising at least about 20, 30, 40, 50, or 60 ORF1 molecules, or about 20-30, 30-40, 40-50, 50-60, or 60-70 ORF1 molecules). In some instances, the proteinaceous exterior is formed from ORF1 molecules that were produced in a cell and then purified therefrom. In some instances, the in vitro assembly takes place in a solution free of cells or constituents thereof. In other instances, the in vitro assembly takes place in a solution comprising cell debris (e.g., from lysed cells). In some instances, the in vitro assembly takes place in a solution substantially free of cellular nucleic acid molecules (e.g., genomic DNA, mitochondrial DNA, mRNA, and/or noncoding RNA from a cell).

[1572] As used herein, a nucleic acid “encoding” refers to a nucleic acid sequence encoding an amino acid sequence or a functional polynucleotide (e.g., a non-coding RNA, e.g., an siRNA or miRNA).

[1573] An “exogenous” agent (e.g., an effector, a nucleic acid (e.g., RNA), a gene, payload, protein) as used herein refers to an agent that is either not comprised by, or not encoded by, a corresponding wild-type virus, e.g., an Anellovirus as described herein. In some embodiments, the exogenous agent does not naturally exist, such as a protein or nucleic acid that has a sequence that is altered (e.g., by insertion, deletion, or substitution) relative to a naturally occurring protein or nucleic acid. In some embodiments, the exogenous agent does not naturally exist in the host cell. In some embodiments, the exogenous agent exists naturally in the host cell but is exogenous to the virus. In some embodiments, the exogenous agent exists naturally in the host cell, but is not present at a desired level or at a desired time.

[1574] A “first” or “second” Anellovirus genomic sequence, as used herein, each refer to a distinct nucleic acid sequence of a genetic element of a virus of the Anelloviridae family or of an Anelloviridae family vector. In some embodiments, the first or second Anellovirus genomic sequence is a wild-type Anellovirus genomic sequence. In some embodiments, the first or second Anellovirus genomic sequence is a synthetic Anellovirus genomic sequence. The first and second Anellovirus genomic sequences comprise at least one nucleotide difference (e.g., substitution, deletion, or insertion) relative to each other.

[1575] A “heterologous” agent or element (e.g., an effector, a nucleic acid sequence, an amino acid sequence), as used herein with respect to another agent or element (e.g., an effector, a nucleic acid sequence, an amino acid sequence), refers to agents or elements that are not naturally found together, e.g., in a wild-type virus, e.g., an Anellovirus. In some embodiments, a heterologous nucleic acid sequence may be present in the same nucleic acid as a naturally occurring nucleic acid sequence (e.g., a sequence that is naturally occurring in the Anellovirus). In some embodiments, a heterologous agent or element is exogenous relative to an Anellovirus from which other (e.g., the remainder of) elements of the anellovector are based.

[1576] As used herein, the term “genetic element” refers to a nucleic acid sequence, generally in an anellovector. It is understood that the genetic element can be produced as naked DNA and optionally further assembled into a proteinaceous exterior. It is also understood that an anellovector can insert its genetic element into a cell, resulting in the genetic element being present in the cell and the proteinaceous exterior not necessarily entering the cell.

[1577] As used herein, the term “ORF1 molecule” refers to a polypeptide having an activity and/or a structural feature of an Anellovirus ORF1 protein (e.g., an Anellovirus ORF1 protein as described herein, e.g., as listed in Tables A1-A32), or a functional fragment thereof. An ORF1 molecule may, in some instances, comprise one or more of (e.g., 1, 2, 3 or 4 of): a first region comprising at least 60% basic residues (e.g., at least 60% arginine residues), a second region compising at least about six beta strands (e.g., at least 4, 5, 6, 7, 8, 9, 10, 11, or 12 beta strands), a third region comprising a structure or an activity of an Anellovirus structural N22 domain (e.g., as described herein, e.g., an structural N22 domain from an Anellovirus ORF1 protein as described herein), and/or a fourth region comprising a structure or an activity of an Anellovirus structural C-terminal domain (CTD) (e.g., as described herein, e.g., a CTD from an Anellovirus ORF1 protein as described herein). In some instances, the ORF1 molecule comprises, in N-terminal to C-terminal order, the first, second, third, and fourth regions. In some instances, an anellovector comprises an ORF1 molecule comprising, in N-terminal to C-terminal order, the first, second, third, and fourth regions. An ORF1 molecule may, in some instances, comprise a polypeptide encoded by an Anellovirus ORF1 nucleic acid (e.g., as listed in any of Tables N1-N32). An ORF1 molecule may, in some instances, further comprise a heterologous sequence, e.g., a hypervariable region (HVR), e.g., an HVR from an Anellovirus ORF1 protein, e.g., as described herein. An “Anellovirus ORF1 protein,” as used herein, refers to an ORF1 protein encoded by an Anellovirus genome (e.g., a wild-type Anellovirus genome, e.g., as described herein), e.g., an ORF1 protein having the amino acid sequence as listed in Tables A1-A32, or as encoded by the ORF1 gene as listed in any of Tables N1-N32.

[1578] As used herein, the term “wild-type ORF1 gene” refers to a nucleic acid sequence that encodes a wild-type ORF1 protein (e.g., as described herein, e.g., a wild-type Ring2 ORF1 protein or a wild-type Ring19 ORF1 protein). In some embodiments, a wild-type ORF1 gene comprises one or more non-coding nucleic acid sequences (e.g., a 5′ UTR or a 3′ UTR). In some embodiments, a wild-type ORF1 gene is a codon-optimized sequence encoding a wild-type ORF1 protein.

[1579] The term “ORF1 domain,” as used herein with respect to an ORF1 molecule, refers to the portion of the ORF1 molecule having the structure or function of an Anellovirus ORF1 protein. The ORF1 domain is generally capable of forming a multimer with other copies of the ORF1 domain (e.g., in other ORF1 molecules), or with other ORF1 molecules, e.g., to form a proteinaceous exterior (e.g., of an anellovector or anelloVLP as described herein). In some instances, the ORF1 molecule may comprise one or more additional domains other than the ORF1 domain (for example, a domain comprising or attached to a surface effector, e.g., as described herein). In some instances, the amino acid sequence of an ORF1 domain comprises an insertion (e.g., an insertion encoding a surface moiety or a domain capable of binding to a surface moiety), e.g., between the N-terminal end and C-terminal end of the ORF1 domain. In certain instances, the insertion does not substantially disrupt the structure and/or function of the ORF1 domain, e.g., such that the ORF1 domain remains capable of forming a multimer with other ORF1 domains or ORF1 molecules. The position within the ORF1 domain sequence into which the insertion is made is referred to herein as the “insertion point.” An insertion can be made into an ORF1 domain by any genetic or polypeptide engineering method known in the art. In some embodiments, an ORF1 molecule consists of an ORF1 domain. In other embodiments, an ORF1 molecule comprises an ORF1 domain and a heterologous domain (e.g., a surface moiety as described herein). In some embodiments, an ORF1 domain is connected to a surface moiety by a polypeptide linker region.

[1580] As used herein, the term “ORF2 molecule” refers to a polypeptide having an activity and/or a structural feature of an Anellovirus ORF2 protein (e.g., an Anellovirus ORF2 protein as described herein, e.g., as listed in Tables A1-A32), or a functional fragment thereof. An “Anellovirus ORF2 protein,” as used herein, refers to an ORF2 protein encoded by an Anellovirus genome (e.g., a wild-type Anellovirus genome, e.g., as described herein), e.g., an ORF2 protein having the amino acid sequence as listed in Tables A1-A32, or as encoded by the ORF2 gene as listed in any of Tables N1-N32.

[1581] As used herein, the term “VP1 molecule” refers to a polypeptide having an activity and/or a structural feature of a CAV VP1 protein (e.g., a CAV VP1 protein as described herein, or a functional fragment thereof. A VP1 molecule may, in some instances, comprise a polypeptide encoded by a CAV VP1 nucleic acid. A VP1 molecule may, in some instances, further comprise a heterologous sequence, e.g., from a CAV VP1 protein, e.g., as described herein. In some embodiments, a VP1 molecule is encoded by a CAV genome (e.g., a wild-type CAV genome, e.g., as described herein). In some embodiments, a VP1 molecule is a polypeptide encoded by a CAV VP1 nucleic acid (e.g., a VP1 gene, e.g., as described herein). In some embodiments, a VP1 molecule is a splice variant or comprises a post-translational modification.

[1582] As used herein, the term “VP2 molecule” refers to a polypeptide having an activity and/or a structural feature of a CAV VP2 protein (e.g., a CAV VP2 protein as described herein, or a functional fragment thereof. In some embodiments, a VP2 molecule is encoded by a CAV genome (e.g., a wild-type CAV genome, e.g., as described herein). In some embodiments, a VP2 molecule is a polypeptide encoded by a CAV VP2 nucleic acid (e.g., a VP2 gene, e.g., as described herein). In some embodiments, a VP2 molecule is a splice variant or comprises a post-translational modification.

[1583] As used herein, the term “Apoptin molecule” and “VP3 molecule” are used interchangeably and refer to a polypeptide having an activity and/or a structural feature of a CAV Apoptin protein (e.g., a CAV Apoptin protein as described herein, or a functional fragment thereof. In some embodiments, an Apoptin molecule is encoded by a CAV genome (e.g., a wild-type CAV genome, e.g., as described herein). In some embodiments, an Apoptin molecule is a polypeptide encoded by a CAV Apoptin nucleic acid (e.g., an Apoptin gene). In some embodiments, an Apoptin molecule is a splice variant or comprises a post-translational modification.

[1584] As used herein, the term “CAV capsid polypeptide” refers to a polypeptide present in the capsid of a wild-type CAV, or a polypeptide having an activity and/or a structural feature of said polypeptide. In some embodiments, the CAV capsid polypeptide is a VP1 molecule.

[1585] As used herein, the term “VP1 nucleic acid” refers to a nucleic acid that encodes a VP1 molecule, or the reverse complement thereof. The nucleic acid may be single stranded or double stranded. In some embodiments, the VP1 nucleic acid comprises a CAV VP1 gene, e.g., as described herein. A “VP1 gene” generally refers to a nucleic acid sequence encoding a wild-type VP1 molecule, or the reverse complement thereof. In some embodiments, a VP1 gene comprises a sense strand. In some embodiments, a VP1 gene comprises an antisense strand. In some embodiments, a VP1 gene is double-stranded.

[1586] As used herein, the term “VP2 nucleic acid” refers to a nucleic acid that encodes a VP2 molecule, or the reverse complement thereof. The nucleic acid may be single stranded or double stranded. In some embodiments, the VP2 nucleic acid comprises a CAV VP2 gene, e.g., as described herein. A “VP2 gene” generally refers to a nucleic acid sequence encoding a wild-type VP2 molecule, or the reverse complement thereof. In some embodiments, a VP2 gene comprises a sense strand. In some embodiments, a VP2 gene comprises an antisense strand. In some embodiments, a VP2 gene is double-stranded.

[1587] As used herein, the term “Apoptin nucleic acid” and “VP3 nucleic acid” are used interchangeably, and refer to a nucleic acid that encodes a Apoptin molecule, or the reverse complement thereof. The nucleic acid may be single stranded or double stranded. In some embodiments, the Apoptin nucleic acid comprises a CAV Apoptin gene, e.g., as described herein. An “Apoptin gene” or “VP3 gene” generally refers to a nucleic acid sequence encoding a wild-type Apoptin molecule, or the reverse complement thereof. In some embodiments, an Apoptin gene comprises a sense strand. In some embodiments, an Apoptin gene comprises an antisense strand. In some embodiments, an Apoptin gene is double-stranded.

[1588] As used herein, the term “CAV genome sequence” refers to a nucleic acid sequence comprising a full-length genome sequence from a wild-type CAV, e.g., as described herein, or a sequence having at least 70%, 75%, 80%, 85%, 90%, 95%, 96%, 97%, 98%, 99%, or 100% sequence identity thereto. In some embodiments, a CAV genome comprises a CAV genome sequence as described herein (e.g., a wild-type CAV genome sequence, e.g., as listed in any of Tables N3-N4).

[1589] As used herein, the term “CAV NCR” refers to a sequence of an untranslated region of an Anellovirus genome sequence that extends from just upstream of the VP2 start codon to the untranslated region of the Anellovirus genome sequence just downstream of the VP1 stop codon in a circular genome (e.g., comprising the sequence of a 5′ NCR and/or a 3′ NCR) from a CAV (e.g., a wild-type CAV, e.g., as described herein, e.g., as listed in Table N3-N4), or a sequence having at least 70%, 75%, 80%, 85%, 90%, 95%, 96%, 97%, 98%, 99%, or 100% identity thereto. In some embodiments, the CAV NCR sequence is contiguous. In some embodiments, the CAV NCR sequence is non-contiguous. In some embodiments, the portions of a non-contiguous CAV NCR sequence are separated by a heterologous insertion (e.g., comprising a recombinase hybrid site, e.g., as described herein). In some embodiments, the CAV NCR sequence comprises a sequence found in a wild-type CAV, and in other embodiments, the CAV NCR comprises one or more mutations relative to the closest CAV sequence. In some embodiments, the CAV NCR is comprised by a nucleic acid molecule that does not comprise CAV VP1 or VP2 coding sequences.

[1590] As used herein, the term “particle” refers to a vehicle having a diameter of less than 100 nm (e.g., about 20-25, 25-30, 30-35, or 35-40 nm) comprising a proteinaceous exterior. In some instances, the particle comprises a plurality of ORF1 molecules. The proteinaceous exterior of the particle generally forms an enclosure capable of limiting or preventing movement of certain molecules between the inside and outside of the proteinaceous exterior. In some embodiments, gaps or discontinuities (e.g., that render the proteinaceous exterior permeable to water, ions, peptides, or small molecules) may be present in the proteinaceous exterior. In certain embodiments, the gaps or discontinuities are of a sufficiently small size (e.g., diameter) that the proteinaceous exterior limits or prevents one or more large macromolecules (e.g., peptides, polypeptides, polynucleotides, lipids, or polysaccharides) from passing through the proteinaceous exterior.

[1591] As used herein, the term “proteinaceous exterior” refers to an exterior component that is predominantly (e.g., >50%, >60%, >70%, >80%, >90%) protein.

[1592] As used herein, the term “recombinase hybrid site” refers to a DNA site having a sequence that, when in double stranded form, is capable of being produced by a site-specific recombinase that recombines two recombinase recognition sites. No particular process of making is implied: a recombinase hybrid site can be produced by a site specific recombinase or another method, such as DNA replication of an existing sequence. In some embodiments, a single stranded DNA that comprises a recombinase hybrid site was produced by a method wherein a site-specific recombinase generated a double stranded DNA comprising a recombinase hybrid site, followed by conversion of the double stranded DNA to a single stranded DNA. In some embodiments (e.g., with Cre recombinase) the recombinase hybrid site has the same sequence as one of the corresponding recombinase recognition sites. In some embodiments (e.g., with Bxb1 recombinase), the recombinase hybrid site has a different site from either of the two corresponding recombinase recognition sites. In some embodiments, the recombinase hybrid site is a loxP site, an attL site, or an attR site.

[1593] As used herein, the term “recombinase recognition site” refers to a DNA site having a sequence that is capable of being recognized by a site-specific recombinase and recombined with a second recombinase recognition site, thereby producing a recombinase hybrid site. In some embodiments, the two recombinase recognition sites recognized by the recombinase have the same sequence, and in other emobdiments, they have different seuqences. In some embodiments, the recombinase recognition site is a loxP site, an attB site, or an attP site.

[1594] As used herein, the term “regulatory nucleic acid” refers to a nucleic acid sequence that modifies expression, e.g., transcription and/or translation, of a DNA sequence that encodes an expression product. In embodiments, the expression product comprises RNA or protein.

[1595] As used herein, the term “regulatory sequence” refers to a nucleic acid sequence that modifies transcription of a target gene product. In some embodiments, the regulatory sequence is a promoter or an enhancer.

[1596] As used herein, the term “replication protein” refers to a protein, e.g., a viral protein, that is utilized during infection, viral genome replication/expression, viral protein synthesis, and/or assembly of the viral components.

[1597] When viewed by electron microscopy, anellovector or anelloVLP particles typically adopt one of two conformations: a symmetrical morphology (e.g., as exemplified in FIG. 7A) and an asymmetrical, or less symmetrical, morphology (e.g., as exemplified in FIG. 7B). Accordingly, the term “symmetrical morphology,” as used herein with respect to anellovector or anelloVLP particle morphology, refers to a particle having a shape that is predominantly symmetrical. The particle having symmetrical morphology may, in some instances, be approximately round. The particle having symmetrical morphology may, in some instances, not be perfectly circular or spherical (e.g., may be ovoid). In some instances, the particle having symmetrical morphology may include one or more deviations from a circular or spherical shape (e.g., one or more protrusions or indentations from its surface).

[1598] As used herein, the term “structural arginine-rich region” refers to a domain of an Anellovirus ORF1 molecule having a structural arginine-rich region sequence as listed in any of Tables B1-1 to B1-12, or a corresponding sequence in another ORF1 molecule.

[1599] As used herein, the term “structural jelly-roll region” refers to a domain of an Anellovirus ORF1 molecule having a structural jelly-roll region sequence as listed in any of Tables B1-1 to B1-12, or a corresponding sequence in another ORF1 molecule.

[1600] As used herein, the term “structural N22 domain” refers to a domain of an Anellovirus ORF1 molecule having a structural N22 domain sequence as listed in any of Tables B1-1 to B1-12, or a corresponding sequence in another ORF1 molecule.

[1601] As used herein, the term “structural C-terminal domain region” refers to a domain of an Anellovirus ORF1 molecule having a structural C-terminal domain sequence as listed in any of Tables B1-1 to B1-12, or a corresponding sequence in another ORF1 molecule.

[1602] As used herein, the term “jelly-roll B—H strands subdomain” refers to a domain of an Anellovirus ORF1 molecule having a jelly-roll B—H strands subdomain sequence as listed in any of Tables B1-1 to B1-12, or a corresponding sequence in another ORF1 molecule.

[1603] As used herein, the term “P1 domain” generally refers to a noncontiguous domain comprising a P1-1 subdomain and a P1-2 subdomain, e.g., of an Anellovirus ORF1 molecule.

[1604] As used herein, the term “P1-1 subdomain” refers to a domain of an Anellovirus ORF1 molecule having a P1-1 domain sequence as listed in any of Tables B1-1 to B1-12, or a corresponding sequence in another ORF1 molecule.

[1605] As used herein, the term “P2 domain” refers to a domain of an Anellovirus ORF1 molecule having a P2 domain sequence as listed in any of Tables B1-1 to B1-12, or a corresponding sequence in another ORF1 molecule.

[1606] As used herein, the term “P1-2 subdomain” refers to a domain of an Anellovirus ORF1 molecule having a P1-2 subdomain sequence as listed in any of Tables B1-1 to B1-12, or a corresponding sequence in another ORF1 molecule.

[1607] As used herein, the term “jelly-roll I strand subdomain” refers to a domain of an Anellovirus ORF1 molecule having a jelly-roll I strand subdomain sequence as listed in any of Tables B1-1 to B1-12, or a corresponding sequence in another ORF1 molecule.

[1608] As used herein, the term “mutant ORF1,” as applied to a particular domain or region of an ORF1 molecule, refers to a non-naturally occurring ORF1 domain or region comprising at least one sequence difference (e.g., addition, deletion, or substitution) relative to the closest naturally-occurring ORF1 domain or region sequence. For instance, a “mutant ORF1 structural jelly-roll region” comprises at least one sequence difference (e.g., addition, deletion, or substitution) relative to the closest naturally-occurring Anellovirus ORF1 structural jelly-roll region.

[1609] As used herein, a “substantially non-pathogenic” organism, particle, or component, refers to an organism, particle (e.g., a virus or an anellovector, e.g., as described herein), or component thereof that does not cause or induce a detectable disease or pathogenic condition, e.g., in a host organism, e.g., a mammal, e.g., a human. In some embodiments, administration of an anellovector to a subject can result in minor reactions or side effects that are acceptable as part of standard of care.

[1610] As used herein, the term “non-pathogenic” refers to an organism or component thereof that does not cause or induce a detectable disease or pathogenic condition, e.g., in a host organism, e.g., a mammal, e.g., a human.

[1611] As used herein, a “substantially non-integrating” genetic element refers to a genetic element, e.g., a genetic element in a virus or anellovector, e.g., as described herein, wherein less than about 0.01%, 0.05%, 0.1%, 0.5%, or 1% of the genetic element that enter into a host cell (e.g., a eukaryotic cell) or organism (e.g., a mammal, e.g., a human) integrate into the genome. In some embodiments the genetic element does not detectably integrate into the genome of, e.g., a host cell. In some embodiments, integration of the genetic element into the genome can be detected using techniques as described herein, e.g., nucleic acid sequencing, PCR detection and/or nucleic acid hybridization.

[1612] As used herein, a “substantially non-immunogenic” organism, particle, or component, refers to an organism, particle (e.g., a virus or anellovector, e.g., as described herein), or component thereof, that does not cause or induce an undesired or untargeted immune response, e.g., in a host tissue or organism (e.g., a mammal, e.g., a human). In some embodiments, the substantially non-immunogenic organism, particle, or component does not produce a detectable immune response. In some embodiments, the substantially non-immunogenic anellovector does not produce a detectable immune response against a protein comprising an amino acid sequence or encoded by a nucleic acid sequence shown in any of Tables N1-N32. In some embodiments, an immune response (e.g., an undesired or untargeted immune response) is detected by assaying antibody presence or level (e.g., presence or level of an anti-anellovector antibody, e.g., presence or level of an antibody against an anellovector as described herein) in a subject, e.g., according to the anti-TTV antibody detection method described in Tsuda et al. (1999; J. Virol. Methods 77: 199-206; incorporated herein by reference) and/or the method for determining anti-TTV IgG levels described in Kakkola et al. (2008; Virology 382: 182-189; incorporated herein by reference). Antibodies against an Anellovirus or an anellovector based thereon can also be detected by methods in the art for detecting anti-viral antibodies, e.g., methods of detecting anti-AAV antibodies, e.g., as described in Calcedo et al. (2013; Front. Immunol. 4(341): 1-7; incorporated herein by reference).

[1613] A “subsequence” as used herein refers to a nucleic acid sequence or an amino acid sequence that is comprised in a larger nucleic acid sequence or amino acid sequence, respectively. In some instances, a subsequence may comprise a domain or functional fragment of the larger sequence. In some instances, the subsequence may comprise a fragment of the larger sequence capable of forming secondary and/or tertiary structures when isolated from the larger sequence similar to the secondary and/or tertiary structures formed by the subsequence when present with the remainder of the larger sequence. In some instances, a subsequence can be replaced by another sequence (e.g., a subseqence comprising an exogenous sequence or a sequence heterologous to the remainder of the larger sequence, e.g., a corresponding subsequence from a different Anellovirus).

[1614] As used herein, the term “surface moiety” refers to a moiety for which at least a portion is exposed on the exterior surface of a particle (e.g., exposed to the solution surrounding the particle). The surface moiety is generally attached, directly or indirectly, to a component of the proteinaceous exterior of the particle (e.g., an ORF1 molecule). In some instances, the surface moiety is covalently attached to the component of the proteinaceous exterior of the particle (e.g., the ORF1 molecule). In some instances, the surface moiety is noncovalently attached to the component of the proteinaceous exterior of the particle (e.g., the ORF1 molecule). In some instances, the surface moiety is bound to a binding moiety that is in turn attached (e.g., covalently or noncovalently) to the component of the proteinaceous exterior of the particle (e.g., the ORF1 molecule). In some instances, the surface moiety is comprised in an ORF1 molecule (e.g., is a heterologous domain of an ORF1 molecule). In some instances, a surface moiety is exogenous relative to an Anellovirus (e.g., the Anellovirus from which the ORF1 molecule was derived and/or an Anellovirus for which the ORF1 protein has at least 50%, 60%, 70%, 75%, 80%, 85%, 90%, 95%, 96%, 97%, 98%, 99%, or 100% sequence identity to the ORF1 molecule). In some instances, a surface moiety is exogenous relative a target cell (e.g., a mammalian cell, e.g., a human cell) to be infected by the particle.

[1615] As used herein, “treatment”, “treating” and cognates thereof refer to the medical management of a subject with the intent to improve, ameliorate, stabilize, prevent or cure a disease, pathological condition, or disorder. This term includes active treatment (treatment directed to improve the disease, pathological condition, or disorder), causal treatment (treatment directed to the cause of the associated disease, pathological condition, or disorder), palliative treatment (treatment designed for the relief of symptoms), preventative treatment (treatment directed to preventing, minimizing or partially or completely inhibiting the development of the associated disease, pathological condition, or disorder); and supportive treatment (treatment employed to supplement another therapy).

[1616] As used herein, the term “virome” refers to viruses in a particular environment, e.g., a part of a body, e.g., in an organism, e.g. in a cell, e.g. in a tissue.

[1617] This invention relates generally to Anelloviridae family vectors (e.g., anellovectors), e.g., synthetic Anelloviridae family vectors (e.g., anellovectors), and uses thereof. The present disclosure provides Anelloviridae family vectors (e.g., anellovectors), compositions comprising Anelloviridae family vectors (e.g., anellovectors), and methods of making or using Anelloviridae family vectors (e.g., anellovectors). Anelloviridae family vectors (e.g., anellovectors) are generally useful as delivery vehicles, e.g., for delivering a therapeutic agent to a eukaryotic cell. Generally, an Anelloviridae family vector (e.g., anellovector) will include a genetic element comprising a nucleic acid sequence (e.g., encoding an effector, e.g., an exogenous effector or an endogenous effector) enclosed within a proteinaceous exterior. An Anelloviridae family vector (e.g., anellovector) may include one or more deletions of sequences (e.g., regions or domains as described herein) relative to an Anellovirus sequence (e.g., as described herein). Anelloviridae family vectors (e.g., anellovectors) can be used as a substantially non-immunogenic vehicle for delivering the genetic element, or an effector encoded therein (e.g., a polypeptide or nucleic acid effector, e.g., as described herein), into eukaryotic cells, e.g., to treat a disease or disorder in a subject comprising the cells.

TABLE OF CONTENTS

```
I. Anelloviridae family vectors (e.g., anellovectors) and AnelloVLPs
  A. Anelloviridae family vectors (e.g., Anellovectors)B. ORF1 molecules
    i. Anellovirus ORF1 molecule domain structures
    ii. Structural arginine-rich region deletions and truncations
    iii. Structural C-terminal domain deletions and truncations
    iv. Chimeric ORF1 molecules
      (a) N-terminal insertions (e.g., structural arginine-rich region swaps)
      (b) P1/P2 domain swaps
      (c) Other domain mutants
  C. ORF2 molecules
  D. Genetic elements
  E. Protein binding sequences
  F. 5′ UTR Regions
  G. GC-rich regions
  H. Effectors
  I. Proteinaceous exterior
  J. Surface moieties
    i. Click chemistry
      (a) Mutations of surface lysines
      (b) Mutations of surface cysteines
    ii. Polypeptides
    iii. Genetic grafting of ORF1 to a surface moiety
    iv. X-fold symmetry
    v. Nucleic acid molecules
    vi. Small molecules
    vii. Vaccines/Antigens
    viii. Ligands
II. Compositions and Methods for Making Anellovectors and AnelloVLPs
  A. Components and Assembly of Anellovectors and AnelloVLPs
    i. ORF1 molecules, e.g., for assembly of anellovectors
    ii. ORF2 molecules, e.g., for assembly of anellovectors
    iii. Production of protein components
      (a) Baculovirus expression systems
      (b) Insect cell systems
      (c) Mammalian cell systems
  B. Recombinase-based production of genetic elements and Anelloviridae family vectors
      (a) Three-plasmid systems
      (b) Two-plasmid systems
      (c) Self-replicating rescue (SRR) constructs (e.g., SRR plasmids)
      (d) Bacterial minicircle systems
      (e) Conversion of minicircles to cssDNA genetic elements
      (f) Exemplary site-specific recombinases and recombinase recognition sites
  C. Genetic Element Constructs, e.g., for assembly of Anellovectors
    i. Plasmids
    ii. Constructs comprising recombinase recognition sequences
    iii. Small circular nucleic acid constructs
    iv. Cis/trans constructs
    v. Expression cassettes
    vi. Design and production of a genetic element construct
  D. Effectors
  E. Host Cells
    i. Introduction of genetic elements into host cells
    ii. Methods for providing protein(s) in cis or trans
    iii. Exemplary cell types
  F. Culture Conditions
  G. Harvest
  H. In vitro assembly methods for anellovectors
  I. In vitro assembly for anelloVLPs
  J. Enrichment and Purification
III. Vectors
IV. Compositions
V. Host cells
VI. Methods of use
  A. Methods of Treatment (e.g., for diseases or disorders of the eye)
VII. Methods of production
VIII. Administration/ Delivery
  A. Ocular delivery
  B. Redosing
```

### I. Anelloviridae Family Vectors (e.g., Anellovectors) and AnelloVLPs

[1618] In some aspects, the invention described herein comprises compositions and methods of using and making an Anelloviridae family vector (e.g., an anellovector), Anelloviridae family VLPs (e.g., anelloVLPs), and preparations and therapeutic compositions relating to same.

### Anelloviridae Family Vectors (e.g., Anellovectors)

[1619] Provided herein are particles for drug delivery comprising one or more polypeptides or nucleic acid elements from an Anelloviridae family virus (e.g., an Anellovirus or CAV, e.g., as described herein). It is noted that descriptions herein referring to anellovectors are likewise applicable to other Anelloviridae family vectors, such as vectors based on CAV. Similarly, descriptions herein referring to Anelloviruses (or components thereof, such as nucleic acid sequences or polypeptides) are applicable to other Anelloviridae family viruses, such as CAV (or components thereof). In some embodiments, the anellovector has a sequence, structure, and/or function that is based on an Anellovirus (e.g., an Anellovirus as described herein, e.g., an Anellovirus comprising a nucleic acid or polypeptide comprising a sequence as shown in any one of Tables A1-A32 or N1-N32), or fragments or portions thereof, or other substantially non-pathogenic virus, e.g., a symbiotic virus, commensal virus, native virus. In some embodiments, an Anellovirus-based anellovector comprises at least one element exogenous to that Anellovirus, e.g., an exogenous effector or a nucleic acid sequence encoding an exogenous effector disposed within a genetic element of the anellovector. In some embodiments, an Anellovirus-based anellovector comprises at least one element heterologous to another element from that Anellovirus, e.g., an effector-encoding nucleic acid sequence that is heterologous to another linked nucleic acid sequence, such as a promoter element. In some embodiments, an anellovector comprises a genetic element (e.g., circular DNA, e.g., single stranded DNA), which comprise at least one element that is heterologous relative to the remainder of the genetic element and/or the proteinaceous exterior (e.g., an exogenous element encoding an effector, e.g., as described herein). An anellovector may be a delivery vehicle (e.g., a substantially non-pathogenic delivery vehicle) for a payload into a host, e.g., a human. In some embodiments, the anellovector is capable of replicating in a eukaryotic cell, e.g., a mammalian cell, e.g., a human cell. In some embodiments, the anellovector is substantially non-pathogenic and/or substantially non-integrating in the mammalian (e.g., human) cell. In some embodiments, the anellovector is substantially non-immunogenic in a mammal, e.g., a human. In some embodiments, the anellovector is replication-deficient. In some embodiments, the anellovector is replication-competent.

[1620] In some embodiments the anellovector comprises a curon, or a component thereof (e.g., a genetic element, e.g., comprising a sequence encoding an effector, and/or a proteinaceous exterior), e.g., as described in PCT Application No. PCT/US2018/037379, which is incorporated herein by reference in its entirety.

[1621] In an aspect, the invention includes an anellovector comprising (i) a genetic element comprising a promoter element, a sequence encoding an effector, (e.g., an endogenous effector or an exogenous effector, e.g., a payload), and a protein binding sequence (e.g., an exterior protein binding sequence, e.g., a packaging signal), wherein the genetic element is a single-stranded DNA, and has one or both of the following properties: is circular and/or integrates into the genome of a eukaryotic cell at a frequency of less than about 0.001%, 0.005%, 0.01%, 0.05%, 0.1%, 0.5%, 1%, 1.5%, or 2% of the genetic element that enters the cell; and (ii) a proteinaceous exterior; wherein the genetic element is enclosed within the proteinaceous exterior; and wherein the anellovector is capable of delivering the genetic element into a eukaryotic cell.

[1622] In some embodiments of the anellovector described herein, the genetic element integrates at a frequency of less than about 0.001%, 0.005%, 0.01%, 0.05%, 0.1%, 0.5%, 1%, 1.5%, or 2% of the genetic element that enters a cell. In some embodiments, less than about 0.01%, 0.05%, 0.1%, 0.5%, 1%, 2%, 3%, 4%, or 5% of the genetic elements from a plurality of the anellovectors administered to a subject will integrate into the genome of one or more host cells in the subject. In some embodiments, the genetic elements of a population of anellovectors, e.g., as described herein, integrate into the genome of a host cell at a frequency less than that of a comparable population of AAV viruses, e.g., at about a 50%, 60%, 70%, 75%, 80%, 85%, 90%, 95%, 100%, or more lower frequency than the comparable population of AAV viruses.

[1623] In an aspect, the invention includes an anellovector comprising: (i) a genetic element comprising a promoter element and a sequence encoding an effector (e.g., an endogenous effector or an exogenous effector, e.g., a payload), and a protein binding sequence (e.g., an exterior protein binding sequence), wherein the genetic element has at least 75% (e.g., at least 75, 76, 77, 78, 79, 80, 90, 91, 92, 93, 94, 95, 96, 97, 98, 99, or 100%) sequence identity to a wild-type Anellovirus sequence (e.g., a wild-type Torque Teno virus (TTV), Torque Teno mini virus (TTMV), or TTMDV sequence, e.g., a wild-type Anellovirus sequence as listed in any one of Tables N1-N32); and (ii) a proteinaceous exterior; wherein the genetic element is enclosed within the proteinaceous exterior; and wherein the anellovector is capable of delivering the genetic element into a eukaryotic cell.

[1624] In one aspect, the invention includes an anellovector comprising:
[1625] a) a genetic element comprising (i) a sequence encoding an exterior protein (e.g., a non-pathogenic exterior protein), (ii) an exterior protein binding sequence that binds the genetic element to the non-pathogenic exterior protein, and (iii) a sequence encoding an effector (e.g., an endogenous or exogenous effector); and
[1626] b) a proteinaceous exterior that is associated with, e.g., envelops or encloses, the genetic element.

[1627] In some embodiments, the anellovector includes sequences or expression products from (or having >70%, 75%, 80%, 85%, 90%, 95%, 97%, 98%, 99%, 100% homology to) a non-enveloped, circular, single-stranded DNA virus. Animal circular single-stranded DNA viruses generally refer to a subgroup of single strand DNA (ssDNA) viruses, which infect eukaryotic non-plant hosts, and have a circular genome. Thus, animal circular ssDNA viruses are distinguishable from ssDNA viruses that infect prokaryotes (i.e. Microviridae and Inoviridae) and from ssDNA viruses that infect plants (i.e. Geminiviridae and Nanoviridae). They are also distinguishable from linear ssDNA viruses that infect non-plant eukaryotes (i.e. Parvoviridiae).

[1628] In some embodiments, the anellovector modulates a host cellular function, e.g., transiently or long term. In certain embodiments, the cellular function is stably altered, such as a modulation that persists for at least about 1 hr to about 30 days, or at least about 2 hrs, 6 hrs, 12 hrs, 18 hrs, 24 hrs, 2 days, 3, days, 4 days, 5 days, 6 days, 7 days, 8 days, 9 days, 10 days, 11 days, 12 days, 13 days, 14 days, 15 days, 16 days, 17 days, 18 days, 19 days, 20 days, 21 days, 22 days, 23 days, 24 days, 25 days, 26 days, 27 days, 28 days, 29 days, 30 days, 60 days, or longer or any time therebetween. In certain embodiments, the cellular function is transiently altered, e.g., such as a modulation that persists for no more than about 30 mins to about 7 days, or no more than about 1 hr, 2 hrs, 3 hrs, 4 hrs, 5 hrs, 6 hrs, 7 hrs, 8 hrs, 9 hrs, 10 hrs, 11 hrs, 12 hrs, 13 hrs, 14 hrs, 15 hrs, 16 hrs, 17 hrs, 18 hrs, 19 hrs, 20 hrs, 21 hrs, 22 hrs, 24 hrs, 36 hrs, 48 hrs, 60 hrs, 72 hrs, 4 days, 5 days, 6 days, 7 days, or any time therebetween.

[1629] In some embodiments, the genetic element comprises a promoter element. In some embodiments, the promoter element is selected from an RNA polymerase II-dependent promoter, an RNA polymerase III-dependent promoter, a PGK promoter, a CMV promoter, an EF-1α promoter, an SV40 promoter, a CAGG promoter, or a UBC promoter, TTV viral promoters, Tissue specific, U6 (pollIII), minimal CMV promoter with upstream DNA binding sites for activator proteins (TetR-VP16, Gal4-VP16, dCas9-VP16, etc). In some embodiments, the promoter element comprises a TATA box. In some embodiments, the promoter element is endogenous to a wild-type Anellovirus, e.g., as described herein.

[1630] In some embodiments, the genetic element comprises one or more of the following characteristics: single-stranded, circular, negative strand, and/or DNA. In some embodiments, the genetic element comprises an episome. In some embodiments, the portions of the genetic element excluding the effector have a combined size of about 2.5-5 kb (e.g., about 2.8-4 kb, about 2.8-3.2 kb, about 3.6-3.9 kb, or about 2.8-2.9 kb), less than about 5 kb (e.g., less than about 2.9 kb, 3.2 kb, 3.6 kb, 3.9 kb, or 4 kb), or at least 100 nucleotides (e.g., at least 1 kb).

[1631] The anellovectors, compositions comprising anellovectors, methods using such anellovectors, etc., as described herein are, in some instances, based in part on the examples which illustrate how different effectors, for example miRNAs (e.g. against IFN or miR-625), shRNA, etc and protein binding sequences, for example DNA sequences that bind to capsid protein such as Q99153, are combined with proteinaceious exteriors, for example a capsid disclosed in Arch Virol (2007) 152: 1961-1975, to produce anellovectors which can then be used to deliver an effector to cells (e.g., animal cells, e.g., human cells or non-human animal cells such as pig or mouse cells). In embodiments, the effector can silence expression of a factor such as an interferon. The examples further describe how anellovectors can be made by inserting effectors into sequences derived, e.g., from an Anellovirus. It is on the basis of these examples that the description hereinafter contemplates various variations of the specific findings and combinations considered in the examples. For example, the skilled person will understand from the examples that the specific miRNAs are used just as an example of an effector and that other effectors may be, e.g., other regulatory nucleic acids or therapeutic peptides. Similarly, the specific capsids used in the examples may be replaced by substantially non-pathogenic proteins described hereinafter. The specifc Anellovirus sequences described in the examples may also be replaced by the Anellovirus sequences described hereinafter. These considerations similarly apply to protein binding sequences, regulatory sequences such as promoters, and the like. Independent thereof, the person skilled in the art will in particular consider such embodiments which are closely related to the examples.

[1632] In some embodiments, an anellovector, or the genetic element comprised in the anellovector, is introduced into a cell (e.g., a human cell). In some embodiments, the effector (e.g., an RNA, e.g., an miRNA), e.g., encoded by the genetic element of an anellovector, is expressed in a cell (e.g., a human cell), e.g., once the anellovector or the genetic element has been introduced into the cell. In some embodiments, introduction of the anellovector, or genetic element comprised therein, into a cell modulates (e.g., increases or decreases) the level of a target molecule (e.g., a target nucleic acid, e.g., RNA, or a target polypeptide) in the cell, e.g., by altering the expression level of the target molecule by the cell. In some embodiments, introduction of the anellovector, or genetic element comprised therein, decreases level of interferon produced by the cell. In some embodiments, introduction of the anellovector, or genetic element comprised therein, into a cell modulates (e.g., increases or decreases) a function of the cell. In some embodiments, introduction of the anellovector, or genetic element comprised therein, into a cell modulates (e.g., increases or decreases) the viability of the cell. In some embodiments, introduction of the anellovector, or genetic element comprised therein, into a cell decreases viability of a cell (e.g., a cancer cell).

[1633] In some embodiments, an anellovector (e.g., a synthetic anellovector) described herein induces an antibody prevalence of less than 70% (e.g., less than about 60%, 50%, 40%, 30%, 20%, or 10% antibody prevalence). In some embodiments, antibody prevalence is determined according to methods known in the art. In some embodiments, antibody prevalence is determined by detecting antibodies against an Anellovirus (e.g., as described herein), or an anellovector based thereon, in a biological sample, e.g., according to the anti-TTV antibody detection method described in Tsuda et al. (1999; J. Virol. Methods 77: 199-206; incorporated herein by reference) and/or the method for determining anti-TTV IgG seroprevalence described in Kakkola et al. (2008; Virology 382: 182-189; incorporated herein by reference). Antibodies against an Anellovirus or an anellovector based thereon can also be detected by methods in the art for detecting anti-viral antibodies, e.g., methods of detecting anti-AAV antibodies, e.g., as described in Calcedo et al. (2013; Front. Immunol. 4(341): 1-7; incorporated herein by reference).

[1634] In some embodiments, a replication deficient, replication defective, or replication incompetent genetic element does not encode all of the necessary machinery or components required for replication of the genetic element. In some embodiments, a replication defective genetic element does not encode a replication factor. In some embodiments, a replication defective genetic element does not encode one or more ORFs (e.g., ORF1, ORF1/1, ORF1/2, ORF2, ORF2/2, ORF2/3, and/or ORF2t/3, e.g., as described herein). In some embodiments, the machinery or components not encoded by the genetic element may be provided in trans (e.g., using a helper, e.g., a helper virus or helper plasmid, or encoded in a nucleic acid comprised by the host cell, e.g., integrated into the genome of the host cell), e.g., such that the genetic element can undergo replication in the presence of the machinery or components provided in trans.

[1635] In some embodiments, a packaging deficient, packaging defective, or packaging incompetent genetic element cannot be packaged into a proteinaceous exterior (e.g., wherein the proteinaceous exterior comprises a capsid or a portion thereof, e.g., comprising a polypeptide encoded by an ORF1 nucleic acid, e.g., as described herein). In some embodiments, a packaging deficient genetic element is packaged into a proteinaceous exterior at an efficiency less than 10% (e.g., less than 10%, 9%, 8%, 7%, 6%, 5%, 4%, 3%, 2%, 1%, 0.5%, 0.1%, 0.01%, or 0.001%) compared to a wild-type Anelloviridae family virus (e.g., Anellovirus) (e.g., as described herein). In some embodiments, the packaging defective genetic element cannot be packaged into a proteinaceous exterior even in the presence of factors (e.g., ORF1, ORF1/1, ORF1/2, ORF2, ORF2/2, ORF2/3, or ORF2t/3) that would permit packaging of the genetic element of a wild-type Anelloviridae family virus (e.g., Anellovirus) (e.g., as described herein). In some embodiments, a packaging deficient genetic element is packaged into a proteinaceous exterior at an efficiency less than 10% (e.g., less than 10%, 9%, 8%, 7%, 6%, 5%, 4%, 3%, 2%, 1%, 0.5%, 0.1%, 0.01%, or 0.001%) compared to a wild-type Anelloviridae family virus (e.g., Anellovirus) (e.g., as described herein), even in the presence of factors (e.g., ORF1, ORF1/1, ORF1/2, ORF2, ORF2/2, ORF2/3, or ORF2t/3) that would permit packaging of the genetic element of a wild-type Anelloviridae family virus (e.g., Anellovirus) (e.g., as described herein).

[1636] In some embodiments, a packaging competent genetic element can be packaged into a proteinaceous exterior (e.g., wherein the proteinaceous exterior comprises a capsid or a portion thereof, e.g., comprising a polypeptide encoded by an ORF1 nucleic acid, e.g., as described herein). In some embodiments, a packaging competent genetic element is packaged into a proteinaceous exterior at an efficiency of at least 20% (e.g., at least 20%, 30%, 40%, 50%, 60%, 70%, 80%, 85%, 90%, 95%, 96%, 97%, 98%, 99%, 100%, or higher) compared to a wild-type Anelloviridae family virus (e.g., Anellovirus) (e.g., as described herein). In some embodiments, the packaging competent genetic element can be packaged into a proteinaceous exterior in the presence of factors (e.g., ORF1, ORF1/1, ORF1/2, ORF2, ORF2/2, ORF2/3, or ORF2t/3) that would permit packaging of the genetic element of a wild-type Anelloviridae family virus (e.g., Anellovirus) (e.g., as described herein). In some embodiments, a packaging competent genetic element is packaged into a proteinaceous exterior at an efficiency of at least 20% (e.g., at least 20%, 30%, 40%, 50%, 60%, 70%, 80%, 85%, 90%, 95%, 96%, 97%, 98%, 99%, 100%, or higher) compared to a wild-type Anelloviridae family virus (e.g., Anellovirus) (e.g., as described herein) in the presence of factors (e.g., ORF1, ORF1/1, ORF1/2, ORF2, ORF2/2, ORF2/3, or ORF2t/3) that would permit packaging of the genetic element of a wild-type Anelloviridae family virus (e.g., Anellovirus) (e.g., as described herein).

### AnelloVLPs

[1637] In some embodiments, the anelloVLP has a sequence, structure, and/or function that is based on an Anellovirus (e.g., an Anellovirus as described herein, e.g., an Anellovirus comprising a nucleic acid or polypeptide comprising a sequence as shown in any one of Tables A1-A32), or fragments or portions thereof, or other substantially non-pathogenic virus, e.g., a symbiotic virus, commensal virus, native virus. In some embodiments, an Anellovirus-based anelloVLP comprises at least one element exogenous to that Anellovirus, e.g., an exogenous effector or a nucleic acid sequence encoding an exogenous effector. In some embodiments, the anelloVLP comprises a surface moiety comprising the exogenous effector. In some embodiments, an Anellovirus-based anelloVLP comprises at least one element heterologous to another element from that Anellovirus, e.g., an effector-encoding nucleic acid sequence that is heterologous to another linked nucleic acid sequence, such as a promoter element. An anelloVLP may be a delivery vehicle (e.g., a substantially non-pathogenic delivery vehicle) for a payload into a host, e.g., a human. In some embodiments, the anelloVLP is not capable of replicating in a eukaryotic cell, e.g., a mammalian cell, e.g., a human cell. In some embodiments, the anelloVLP is substantially non-pathogenic and/or substantially non-integrating in the mammalian (e.g., human) cell. In some embodiments, the anelloVLP is substantially non-immunogenic in a mammal, e.g., a human.

[1638] In an aspect, the invention includes an anelloVLP comprising a proteinaceous exterior and an effector (e.g., an exogenous effector); wherein the anelloVLP is capable of delivering the exogenous effector into a eukaryotic cell. In some embodiments, the exogenous effector is enclosed within the proteinaceous exterior. In some embodiments, the exogenous effector is comprised in a surface moiety on the surface of the anelloVLP (e.g., as described herein). In some embodiments, the proteinaceous exterior comprises one or more ORF1 molecules (e.g., an Anellovirus ORF1 protein, e.g., as described herein, or a polypeptide having at least 50%, 60%, 70%, 75%, 80%, 85%, 90%, 95%, 96%, 97%, 98%, or 99% sequence identity thereto).

[1639] In some embodiments, the anelloVLP includes sequences or expression products from (or having >70%, 75%, 80%, 85%, 90%, 95%, 97%, 98%, 99%, 100% homology to) a non-enveloped, circular, single-stranded DNA virus. Animal circular single-stranded DNA viruses generally refer to a subgroup of single strand DNA (ssDNA) viruses, which infect eukaryotic non-plant hosts, and have a circular genome. Thus, animal circular ssDNA viruses are distinguishable from ssDNA viruses that infect prokaryotes (i.e. Microviridae and Inoviridae) and from ssDNA viruses that infect plants (i.e. Geminiviridae and Nanoviridae). They are also distinguishable from linear ssDNA viruses that infect non-plant eukaryotes (i.e. Parvoviridiae).

[1640] In some embodiments, the anelloVLP modulates a host cellular function, e.g., transiently or long term. In certain embodiments, the cellular function is stably altered, such as a modulation that persists for at least about 1 hr to about 30 days, or at least about 2 hrs, 6 hrs, 12 hrs, 18 hrs, 24 hrs, 2 days, 3, days, 4 days, 5 days, 6 days, 7 days, 8 days, 9 days, 10 days, 11 days, 12 days, 13 days, 14 days, 15 days, 16 days, 17 days, 18 days, 19 days, 20 days, 21 days, 22 days, 23 days, 24 days, 25 days, 26 days, 27 days, 28 days, 29 days, 30 days, 60 days, or longer or any time therebetween. In certain embodiments, the cellular function is transiently altered, e.g., such as a modulation that persists for no more than about 30 mins to about 7 days, or no more than about 1 hr, 2 hrs, 3 hrs, 4 hrs, 5 hrs, 6 hrs, 7 hrs, 8 hrs, 9 hrs, 10 hrs, 11 hrs, 12 hrs, 13 hrs, 14 hrs, 15 hrs, 16 hrs, 17 hrs, 18 hrs, 19 hrs, 20 hrs, 21 hrs, 22 hrs, 24 hrs, 36 hrs, 48 hrs, 60 hrs, 72 hrs, 4 days, 5 days, 6 days, 7 days, or any time therebetween.

[1641] The anelloVLPs, compositions comprising anelloVLPs, methods using such anelloVLPs, etc., as described herein are, in some instances, based in part on the examples which illustrate how different effectors, for example miRNAs (e.g. against IFN or miR-625), shRNA, etc and protein binding sequences, for example DNA sequences that bind to capsid protein such as Q99153, are combined with proteinaceious exteriors, for example a capsid disclosed in Arch Virol (2007) 152: 1961-1975, to produce anelloVLPs which can then be used to deliver an effector to cells (e.g., animal cells, e.g., human cells or non-human animal cells such as pig or mouse cells). In embodiments, the effector can silence expression of a factor such as an interferon. The examples further describe how anelloVLPs can be made by inserting effectors into sequences derived, e.g., from an Anellovirus. It is on the basis of these examples that the description hereinafter contemplates various variations of the specific findings and combinations considered in the examples. For example, the skilled person will understand from the examples that the specific miRNAs are used just as an example of an effector and that other effectors may be, e.g., other regulatory nucleic acids or therapeutic peptides. Similarly, the specific capsids used in the examples may be replaced by substantially non-pathogenic proteins described hereinafter. The specifc Anellovirus sequences described in the examples may also be replaced by the Anellovirus sequences described hereinafter. These considerations similarly apply to protein binding sequences, regulatory sequences such as promoters, and the like. Independent thereof, the person skilled in the art will in particular consider such embodiments which are closely related to the examples.

[1642] In some embodiments, an anelloVLP is introduced into a cell (e.g., a human cell). In some embodiments, the exogenous effector is delivered to the cell. In some embodiments, delivery of the exogenous effector to a cell modulates (e.g., increases or decreases) the level of a target molecule (e.g., a target nucleic acid, e.g., RNA, or a target polypeptide) in the cell, e.g., by altering the expression level of the target molecule by the cell. In some embodiments, delivery of the exogenous effector to a cell modulates (e.g., increases or decreases) a function of the cell. In some embodiments, delivery of the exogenous effector to a cell modulates (e.g., increases or decreases) the viability of the cell. In some embodiments, delivery of the exogenous effector to a cell decreases viability of a cell (e.g., a cancer cell).

[1643] In some embodiments, an anelloVLP (e.g., a synthetic anelloVLP) described herein induces an antibody prevalence of less than 70% (e.g., less than about 60%, 50%, 40%, 30%, 20%, or 10% antibody prevalence). In some embodiments, antibody prevalence is determined according to methods known in the art. In some embodiments, antibody prevalence is determined by detecting antibodies against an Anellovirus (e.g., as described herein), or an anelloVLP based thereon, in a biological sample, e.g., according to the anti-TTV antibody detection method described in Tsuda et al. (1999; J. Virol. Methods 77: 199-206; incorporated herein by reference) and/or the method for determining anti-TTV IgG seroprevalence described in Kakkola et al. (2008; Virology 382: 182-189; incorporated herein by reference). Antibodies against an Anellovirus or an anelloVLP based thereon can also be detected by methods in the art for detecting anti-viral antibodies, e.g., methods of detecting anti-AAV antibodies, e.g., as described in Calcedo et al. (2013; Front. Immunol. 4(341): 1-7; incorporated herein by reference).

### Anelloviruses

[1644] In some embodiments, an anellovector or anelloVLP, e.g., as described herein, comprises sequences or expression products derived from an Anellovirus. In some embodiments, an anellovector or anelloVLP includes one or more sequences or expression products that are exogenous relative to the Anellovirus. In some embodiments, an anellovector or anelloVLP includes one or more sequences or expression products that are endogenous relative to the Anellovirus. In some embodiments, an anellovector or anelloVLP includes one or more sequences or expression products that are heterologous relative to one or more other sequences or expression products in the anellovector. Anelloviruses generally have single-stranded circular DNA genomes with negative polarity. Anelloviruses have not generally been linked to any human disease. However, attempts to link Anellovirus infection with human disease are confounded by the high incidence of asymptomatic Anellovirus viremia in control cohort population(s), the remarkable genomic diversity within the anellovirus viral family, the historical inability to propagate the agent in vitro, and the lack of animal model(s) of Anellovirus disease (Yzebe et al., Panminerva Med. (2002) 44:167-177; Biagini, P., Vet. Microbiol. (2004) 98:95-101).

[1645] Anelloviruses are generally transmitted by oronasal or fecal-oral infection, mother-to-infant and/or in utero transmission (Gerner et al., Ped. Infect. Dis. J. (2000) 19:1074-1077). Infected persons can, in some instances, be characterized by a prolonged (months to years) Anellovirus viremia. Humans may be co-infected with more than one genogroup or strain (Saback, et al., Scad. J. Infect. Dis. (2001) 33:121-125). There is a suggestion that these genogroups can recombine within infected humans (Rey et al, Infect. (2003) 31:226-233). The double stranded isoform (replicative) intermediates have been found in several tissues, such as liver, peripheral blood mononuclear cells and bone marrow (Kikuchi et al., J. Med. Virol. (2000) 61:165-170; Okamoto et al., Biochem. Biophys. Res. Commun. (2002) 270:657-662; Rodriguez-lnigo et al., Am. J. Pathol. (2000) 156:1227-1234).

[1646] In some embodiments, an anellovector or anelloVLP as described herein comprises one or more polypeptides (e.g., ORF1 molecules) comprising an amino acid sequence having at least about 50%, 60%, 70%, 75%, 80%, 85%, 90%, 95%, 96%, 97%, 98%, 99%, or 100% sequence identity to an Anellovirus sequence, e.g., as described herein, or a fragment thereof. In embodiments, the polypeptide comprises an amino acid sequence encoded by a nucleic acid sequence selected from a sequence as shown in any one of Tables N1-N32, or a sequence having at least 70%, 75%, 80%, 85%, 90%, 95%, 96%, 97%, 98%, 99%, or 100% sequence identity thereto. In embodiments, the polypeptide comprises a sequence as shown in any one of Tables A1-A32, or a sequence having at least 70%, 75%, 80%, 85%, 90%, 95%, 96%, 97%, 98%, 99%, or 100% sequence identity thereto.

[1647] In some embodiments, the genetic element comprises a nucleotide sequence encoding an amino acid sequence or a functional fragment thereof or a sequence having at least about 60%, 70% 80%, 85%, 90% 95%, 96%, 97%, 98%, 99%, or 100% sequence identity to any one of the amino acid sequences described herein, e.g., an Anellovirus amino acid sequence.

[1648] In some embodiments, an Anelloviridae family vector (e.g., anellovector) as described herein comprises one or more nucleic acid molecules (e.g., a genetic element as described herein) comprising a sequence having at least about 70%, 75%, 80%, 85%, 90%, 95%, 96%, 97%, 98%, 99%, or 100% sequence identity to an Anellovirus sequence, e.g., as described herein, or a fragment thereof. In embodiments, the Anelloviridae family vector (e.g., anellovector) comprises a nucleic acid sequence selected from a sequence as shown in any of Tables N1-N32, or a sequence having at least 70%, 75%, 80%, 85%, 90%, 95%, 96%, 97%, 98%, 99%, or 100% sequence identity thereto. In embodiments, the Anelloviridae family vector (e.g., anellovector) comprises a polypeptide comprising a sequence as shown in Table A1-A32, or a sequence having at least 70%, 75%, 80%, 85%, 90%, 95%, 96%, 97%, 98%, 99%, or 100% sequence identity thereto.

[1649] In some embodiments, an Anelloviridae family vector (e.g., anellovector) as described herein comprises one or more nucleic acid molecules (e.g., a genetic element as described herein) comprising a sequence having at least about 70%, 75%, 80%, 85%, 90%, 95%, 96%, 97%, 98%, 99%, or 100% sequence identity to one or more of a TATA box, cap site, initiator element, transcriptional start site, 5′ UTR conserved domain, ORF1, ORF1/1, ORF1/2, ORF2, ORF2/2, ORF2/3, ORF2t/3, three open-reading frame region, poly(A) signal, GC-rich region, or any combination thereof, of any of the Anelloviridae family viruses (e.g., Anellovirus) described herein (e.g., an Anelloviridae family virus (e.g., Anellovirus) sequence as annotated, or as encoded by a sequence listed, in any of Tables N1-N32. In some embodiments, the nucleic acid molecule comprises a sequence encoding a capsid protein, e.g., an ORF1, ORF1/1, ORF1/2, ORF2, ORF2/2, ORF2/3, or ORF2t/3 sequence of any of the Anelloviruses described herein (e.g., an Anelloviridae family virus (e.g., Anellovirus) sequence as annotated, or as encoded by a sequence listed, in any of Tables N1-N32). In some embodiments, the nucleic acid molecule comprises a sequence encoding a capsid protein comprising an amino acid sequence having at least about 70%, 75%, 80%, 85%, 90%, 95%, 96%, 97%, 98%, 99%, or 100% sequence identity to an Anelloviridae family virus (e.g., Anellovirus) ORF1 or ORF2 protein (e.g., an ORF1 or ORF2 amino acid sequence as shown in Table A1-A32, or an ORF1 or ORF2 amino acid sequence encoded by a nucleic acid sequence as shown in any of Tables N1-N32). In embodiments, the nucleic acid molecule comprises a sequence encoding a capsid protein comprising an amino acid sequence having at least about 70%, 75%, 80%, 85%, 90%, 95%, 96%, 97%, 98%, 99%, or 100% sequence identity to an Anelloviridae family virus (e.g., Anellovirus) ORF1 protein (e.g., an ORF1 amino acid sequence as shown in Table A1-A32, or an ORF1 amino acid sequence encoded by a nucleic acid sequence as shown in any of Tables N1-N32).

### Nucleic Acid Sequences

[1650] In some embodiments, the nucleic acid molecule comprises a nucleic acid sequence having at least about 70%, 75%, 80%, 85%, 90%, 95%, 96%, 97%, 98%, 99%, or 100% sequence identity to the Anelloviridae family virus (e.g., Anellovirus) ORF1 nucleotide sequence of any of Tables N1-N32. In some embodiments, the nucleic acid molecule comprises a nucleic acid sequence having at least about 70%, 75%, 80%, 85%, 90%, 95%, 96%, 97%, 98%, 99%, or 100% sequence identity to the Anelloviridae family virus (e.g., Anellovirus) ORF2 nucleotide sequence of any of Tables N1-N32. In some embodiments, the nucleic acid molecule comprises a nucleic acid sequence having at least about 70%, 75%, 80%, 85%, 90%, 95%, 96%, 97%, 98%, 99%, or 100% sequence identity to the Anelloviridae family virus (e.g., Anellovirus) ORF3 nucleotide sequence of any of Tables N1-N32. In some embodiments, the nucleic acid molecule comprises a nucleic acid sequence having at least about 70%, 75%, 80%, 85%, 90%, 95%, 96%, 97%, 98%, 99%, or 100% sequence identity to the Anelloviridae family virus (e.g., Anellovirus) GC-rich region nucleotide sequence of any of Tables N1-N32. In some embodiments, the nucleic acid molecule comprises a nucleic acid sequence having at least about 70%, 75%, 80%, 85%, 90%, 95%, 96%, 97%, 98%, 99%, or 100% sequence identity to the Anelloviridae family virus (e.g., Anellovirus) 5′ UTR conserved domain nucleotide sequence of any of Tables N1-N32.

[1651] It is understood that Tables N1-N32 herein provide the positive strand sequence corresponding to a particular Anellovirus. However, as described herein, a genetic element is typically a negative strand (e.g., comprising the reverse complement of a nucleic acid sequence as listed in any of Tables N1-N32, or a portion thereof). Consequently, a 5′ UTR conserved domain of a genetic element as described herein may comprise the reverse complement of a sequence annotated as a 5′ UTR conserved domain (e.g., in any of Tables N1-N32). Consequently, a GC-rich region of a genetic element as described herein may comprise the reverse complement of a sequence annotated as a GC-rich region (e.g., in any of Tables N1-N32).

[1652] In some embodiments, the first Anellovirus genomic sequence is the genomic sequence of an Alphatorquevirus. In some embodiments, the second Anellovirus genomic sequence is the genomic sequence of an Alphatorquevirus. In some embodiments, the first Anellovirus genomic sequence is the genomic sequence of a Betatorquevirus. In some embodiments, the second Anellovirus genomic sequence is the genomic sequence of a Betatorquevirus. In some embodiments, the first Anellovirus genomic sequence is the genomic sequence of a Gammatorquevirus. In some embodiments, the second Anellovirus genomic sequence is the genomic sequence of a Gammatorquevirus. In some embodiments, the first Anellovirus genomic sequence is a Ring1, Ring3.1, Ring4, Ring5.2, Ring 6.0, Ring7, or Ring20 Anellovirus. In some embodiments, the second Anellovirus genomic sequence is a Ring1, Ring3.1, Ring4, Ring5.2, Ring 6.0, Ring7, or Ring20 Anellovirus. The Ring1 Anellovirus genomic sequence is disclosed as SEQ ID NO: 16 of International Application PCT/US2021/037076, and the corresponding amino acid sequences are disclosed in Table A2 of the same International Application, and the sequences are herein incorporated by reference in their entireties. The Ring3.1 Anellovirus genomic sequence is disclosed as SEQ ID NO: 878 of International Application PCT/US2022/015499, and the corresponding amino acid sequences are disclosed in Table B4 of the same International Application, and the sequences are herein incorporated by reference in their entireties. The Ring4 Anellovirus genomic sequence is disclosed as SEQ ID NO: 886 of International Application PCT/US2021/037076, and the corresponding amino acid sequences are disclosed in Table C2 of the same International Application, and the sequences are herein incorporated by reference in their entireties. The Ring5.2 Anellovirus genomic sequence is disclosed as SEQ ID NO: 894 of International Application PCT/US2022/015499, and the corresponding amino acid sequences are disclosed in Table D2 of the same International Application, and the sequences are herein incorporated by reference in their entireties. The Ring6.0 Anellovirus genomic sequence is disclosed as SEQ ID NO: 903 of International Application PCT/US2019/065995, and the corresponding amino acid sequences are disclosed in Table C4 of the same Internation Application, and the sequences are herein incorporated by reference in their entireties. The Ring7 Anellovirus genomic sequence is disclosed as SEQ ID NO: 911 of International Application PCT/US2019/065995, and the corresponding amino acid sequences are disclosed in Table C5 of the same International Application, and the sequences are herein incorporated by reference in their entireties. The Ring20 Anellovirus genomic sequence is disclosed as SEQ ID NO: 1014 of International Application PCT/US2022/015499, and the corresponding amino acid sequences are disclosed in Table F6 of the same International Application, and the sequences are herein incorporated by reference in their entireties.

### Amino Acid Sequences Encoded by Nucleic Acid Sequences

[1653] In embodiments, the nucleic acid molecule comprises a nucleic acid sequence encoding an amino acid sequence having at least about 70%, 75%, 80%, 85%, 90%, 95%, 96%, 97%, 98%, 99%, or 100% sequence identity to the Anelloviridae family virus (e.g., Anellovirus) ORF1 amino acid sequence of Tables A1-A32. In embodiments, the nucleic acid molecule comprises a nucleic acid sequence encoding an amino acid sequence having at least about 70%, 75%, 80%, 85%, 90%, 95%, 96%, 97%, 98%, 99%, or 100% sequence identity to the Anelloviridae family virus (e.g., Anellovirus) ORF2 amino acid sequence of Tables A1-A32. In embodiments, the nucleic acid molecule comprises a nucleic acid sequence encoding an amino acid sequence having at least about 70%, 75%, 80%, 85%, 90%, 95%, 96%, 97%, 98%, 99%, or 100% sequence identity to the Anelloviridae family virus (e.g., Anellovirus) ORF3 amino acid sequence of Tables A1-A32. In some embodiments, the nucleic acid is a genetic element construct or a construct for providing the polypeptide (e.g., an ORF1 molecule and/or an ORF2 molecule) in trans.

### Proteins Comprising Amino Acid Sequences

[1654] In some embodiments, the Anelloviridae family vector described herein comprises an Anellovirus ORF or ORF molecule (e.g., an Anellovirus ORF1, ORF2, ORF2/2, ORF2/3, ORF1/1, or ORF1/2) includes a polypeptide comprising an amino acid sequence having at least 70%, 75%, 80%, 85%, 90%, 95%, 96%, 97%, 98%, 99%, or 100% sequence identity to a corresponding Anellovirus ORF sequence, e.g., as described herein). In embodiments, the Anelloviridae family vector described herein comprises a protein having an amino acid sequence having at least about 70%, 75%, 80%, 85%, 90%, 95%, 96%, 97%, 98%, 99%, or 100% sequence identity to the Anelloviridae family virus (e.g., Anellovirus) ORF1 amino acid sequence of Table A1-A32. In embodiments, the Anelloviridae family vector described herein comprises a protein having an amino acid sequence having at least about 70%, 75%, 80%, 85%, 90%, 95%, 96%, 97%, 98%, 99%, or 100% sequence identity to the Anelloviridae family virus (e.g., Anellovirus) ORF2 amino acid sequence of Table A1-A32. In embodiments, the Anelloviridae family vector described herein comprises a protein having an amino acid sequence having at least about 70%, 75%, 80%, 85%, 90%, 95%, 96%, 97%, 98%, 99%, or 100% sequence identity to the Anelloviridae family virus (e.g., Anellovirus) ORF3 amino acid sequence of Table A1 or A3. In some embodiments, an ORF1 molecule (e.g., comprised in the Anelloviridae family vector) comprises a polypeptide encoded by the Anelloviridae family virus (e.g., Anellovirus) ORF1 nucleic acid sequence of any of Tables N1-N32. In some embodiments, the ORF1 molecule (e.g., comprised in the Anelloviridae family vector) comprises an Anelloviridae family virus (e.g., Anellovirus) ORF1 protein of Table A1-A32 or a splice variant or post-translationally processed (e.g., proteolytically processed) variant thereof. In some embodiments, an ORF2 molecule (e.g., comprised in the Anelloviridae family vector) comprises a polypeptide encoded by the Anelloviridae family virus (e.g., Anellovirus) ORF2 nucleic acid sequence of any of Tables N1-N32. In some embodiments, the ORF2 molecule (e.g., comprised in the Anelloviridae family vector) comprises an Anelloviridae family virus (e.g., Anellovirus) ORF2 protein of Table A1-A32 or a splice variant or post-translationally processed (e.g., proteolytically processed) variant thereof. In some embodiments, an ORF3 molecule (e.g., comprised in the Anelloviridae family vector) comprises a polypeptide encoded by the Anelloviridae family virus (e.g., Anellovirus) ORF3 nucleic acid sequence of any of Tables N1-N32. In some embodiments, the ORF3 molecule (e.g., comprised in the Anelloviridae family vector) comprises an Anelloviridae family virus (e.g., Anellovirus) ORF3 protein of Table A1 or Table A3 or a splice variant or post-translationally processed (e.g., proteolytically processed) variant thereof.

### Polypeptides Comprising Amino Acid Sequences

[1655] In some embodiments, the polypeptide described herein comprises an amino acid sequence having at least about 70%, 75%, 80%, 85%, 90%, 95%, 96%, 97%, 98%, 99%, or 100% sequence identity to an Anelloviridae family virus (e.g., Anellovirus) ORF1 amino acid sequence described herein. In embodiments, the polypeptide described herein comprises an amino acid sequence having at least about 70%, 75%, 80%, 85%, 90%, 95%, 96%, 97%, 98%, 99%, or 100% sequence identity to the Anelloviridae family virus (e.g., Anellovirus) ORF1 amino acid sequence of Table A1-A32.

[1656] In some embodiments, the polypeptide described herein comprises an amino acid sequence having at least about 70%, 75%, 80%, 85%, 90%, 95%, 96%, 97%, 98%, 99%, or 100% sequence identity to an ORF1 molecule encoded by an Anelloviridae family virus (e.g., Anellovirus) ORF1 nucleic acid described herein. In some embodiments, the polypeptide described herein comprises an amino acid sequence having at least about 70%, 75%, 80%, 85%, 90%, 95%, 96%, 97%, 98%, 99%, or 100% sequence identity to an ORF1 molecule encoded by an Anelloviridae family virus (e.g., Anellovirus) ORF1 nucleic acid as listed in Table N1-N32.

[1657] In some embodiments, the polypeptide described herein comprises an amino acid sequence having at least about 70%, 75%, 80%, 85%, 90%, 95%, 96%, 97%, 98%, 99%, or 100% sequence identity to an Anelloviridae family virus (e.g., Anellovirus) ORF2 amino acid sequence described herein. In embodiments, the polypeptide described herein comprises an amino acid sequence having at least about 70%, 75%, 80%, 85%, 90%, 95%, 96%, 97%, 98%, 99%, or 100% sequence identity to the Anelloviridae family virus (e.g., Anellovirus) ORF2 amino acid sequence of Table A1-A32.

[1658] In some embodiments, the polypeptide described herein comprises an amino acid sequence having at least about 70%, 75%, 80%, 85%, 90%, 95%, 96%, 97%, 98%, 99%, or 100% sequence identity to an ORF2 molecule encoded by an Anelloviridae family virus (e.g., Anellovirus) ORF2 nucleic acid described herein. In some embodiments, the polypeptide described herein comprises an amino acid sequence having at least about 70%, 75%, 80%, 85%, 90%, 95%, 96%, 97%, 98%, 99%, or 100% sequence identity to an ORF2 molecule encoded by an Anelloviridae family virus (e.g., Anellovirus) ORF2 nucleic acid as listed in Table N1-N32.

[1659] In some embodiments, the polypeptide described herein comprises an amino acid sequence having at least about 70%, 75%, 80%, 85%, 90%, 95%, 96%, 97%, 98%, 99%, or 100% sequence identity to an Anelloviridae family virus (e.g., Anellovirus) ORF3 amino acid sequence described herein. In embodiments, the polypeptide described herein comprises an amino acid sequence having at least about 70%, 75%, 80%, 85%, 90%, 95%, 96%, 97%, 98%, 99%, or 100% sequence identity to the Anelloviridae family virus (e.g., Anellovirus) ORF3 amino acid sequence of Table A1-A32.

[1660] In some embodiments, the polypeptide described herein comprises an amino acid sequence having at least about 70%, 75%, 80%, 85%, 90%, 95%, 96%, 97%, 98%, 99%, or 100% sequence identity to an ORF3 molecule encoded by an Anelloviridae family virus (e.g., Anellovirus) ORF3 nucleic acid described herein. In some embodiments, the polypeptide described herein comprises an amino acid sequence having at least about 70%, 75%, 80%, 85%, 90%, 95%, 96%, 97%, 98%, 99%, or 100% sequence identity to an ORF3 molecule encoded by an Anelloviridae family virus (e.g., Anellovirus) ORF3 nucleic acid as listed in Table N1-N32.

[1661] In some embodiments, the polypeptide comprises an amino acid sequence (e.g., an ORF1, ORF1/1, ORF1/2, ORF2, ORF2/2, ORF2/3, or ORF2t/3 sequence) as shown in Table A1-A32, or a sequence having at least 70%, 75%, 80%, 85%, 90%, 95%, 96%, 97%, 98%, 99%, or 100% sequence identity thereto.

TABLE N1
Novel Anellovirus nucleic acid sequence (Alphatorquevirus)

| Name | TTV-RTx1 |
|---|---|
| Genus/Clade | Alphatorquevirus, Clade 6 |
| Accession Number | SRR2167793 |
| Full Sequence: 3648 bp | |
| (SEQ ID NO: 830) | |
| Annotations: | |
| Putative Domain | Base range |
| TATA Box | 77 - 81 |
| Initiator Element | 95-110 |
| Transcriptional Start Site | 105 |
| 5′ UTR Conserved Domain | 165 - 235 |
| ORF2 | 335 - 703 |
| ORF2/2 | 335 - 699 ; 2326 - 2759 |
| ORF2/3 | 335 - 699 ; 2552 - 2957 |
| ORF2t/3 | 335-465 ; 2552 - 2957 |
| ORF1 | 574 - 2775 |
| ORF1/1 | 574 - 699 ; 2326 - 2775 |
| ORF1/2 | 574 - 699 ; 2552 - 2759 |
| Three open-reading frame region | 2535 - 2746 |
| Poly(A) Signal | 2953 - 2958 |
| GC-rich region** | 3620 - 3648 |

TABLE A1
Novel Anellovirus amino acid sequences (Alphatorquevirus, Clade 6)
TTV-RTx1 (Alphatorquevirus Clade 6)

| | |
|---|---|
| ORF2 | MSWSRPVHNATGIERNWWESCLRSHASSCGCGNFVNHINVLANRYGFAGS |
| | TETPGNPRPRPPVLSSTTSTPTDQSRPALPWHGDTGGEGASGDPAGDGERGA |
| | AEGDYGPEDLDALFDALDEE (SEQ ID NO: 831) |
| ORF2/2 | MSWSRPVHNATGIERNWWESCLRSHASSCGCGNFVNHINVLANRYGFAGS |
| | TETPGNPRPRPPVLSSTTSTPTDQSRPALPWHGDTGGEGASGDPAGDGERGA |
| | AEGDYGPEDLDALFDALDEEQSKTLVKTKVPDPIDSLETYKLRTRQPWDLN |
| | MCSTRGTGDGASLASELSDACSKNLSTMMSILKNQKDLEYFLQQKQSPETK |
| | SSKKARFQRKKSRYSPQKRSRKRRYSDSSSDSSSDSCASGSSSNSSNNNSSRR |
| | KRACT (SEQ ID NO: 832) |
| ORF2/3 | MSWSRPVHNATGIERNWWESCLRSHASSCGCGNFVNHINVLANRYGFAGS |
| | TETPGNPRPRPPVLSSTTSTPTDQSRPALPWHGDTGGEGASGDPAGDGERGA |
| | AEGDYGPEDLDALFDALDEENRVPKPRARRKLAFRGRKVATLHRRDPERG |
| | DTATVQATAQATAAPRAAAQTPPTTTPQDASGPAPKPPFIFPAINKVYLFPD |
| | RAPKPKPTSGDWETEYAACSAFDRPARTNLSSPPYYPGVPTPWQVKFSLKF |
| | Q (SEQ ID NO: 833) |
| ORF2t/3 | MSWSRPVHNATGIERNWWESCLRSHASSCGCGNFVNHINVLANRNRVPKP |
| | RARRKLAFRGRKVATLHRRDPERGDTATVQATAQATAAPRAAAQTPPTTTP |
| | QDASGPAPKPPFIFPAINKVYLFPDRAPKPKPTSGDWETEYAACSAFDRPART |
| | NLSSPPYYPGVPTPWQVKFSLKFQ (SEQ ID NO: 834) |
| ORF1 | MAWGYWWRRRFWRPRRRWRTWRRRRRLRPRRSRRTFRRTRRRVRRRRW |
| | GRRARRRGWRRRTYIRARRRRRRKRLVLTQWHPAVRRKCKITGYMPIVYC |
| | GHGRASFNYAWHSDDCIKQPLPFGGSLSTVSFNLKVLFDENQRGLNKWSYP |
| | NDQLDLARYKGCRLTFYRKKNTDYIAQYDISEPYQLDKYSCANYHPSKMM |
| | FAKNKILIPSYDTKPRGRQRVRVRIGPPKLFTDKWYSQSDLCKVNLVSLAVS |
| | AASFLHPFGSPQTANFCATFQVLQPFYYQAIGISSTKHSEVIDILYKKNTYWQ |
| | SNITSWFLTNVKNPKNMSTKMFEDINVKSNKDSNYDWFPFTPYTTENYSKIQ |
| | NAAQEYWKYLTSDHPQATNSNEGLVQPWTNATIKQYEYHLGMFSPIFIGPT |
| | RAKTKFKTAYFDCTYNPLLDKGMGNRIWYQYATKADTQISKTGCYCMLED |
| | IPIYAAFYGYVDFIEMEIGKGQDIKENGLICCICRYTDPPMYNEQHPDMGFVF |
| | YNTNFGNGKWIDGRGDIPTYWMQRWRPVVLFQTDVIRDLVETGPFSYKDD |
| | LANTSLTMKYEFYFTWGGNQAYHQTIKNPCKDEGTGPHRQPRDVQVTDPT |
| | TVGPEYVFHAWDWRRGFLSERALRRMFEKPLNYDEYSKKPKRPRIFPPTET |
| | ESRNQELEESSLSEEEKSLLSTEEIQKEEIQRQFKRQLKRQLRLGQQLKLLQQ |
| | QLLKTQAGLHLNPLSYFPQ (SEQ ID NO: 835) |
| ORF1/1 | MAWGYWWRRRFWRPRRRWRTWRRRRRLRPRRSRRTFRRTRRRTIKNPCK |
| | DEGTGPHRQPRDVQVTDPTTVGPEYVFHAWDWRRGFLSERALRRMFEKPL |
| | NYDEYSKKPKRPRIFPPTETESRNQELEESSLSEEEKSLLSTEEIQKEEIQRQFK |
| | RQLKRQLRLGQQLKLLQQQLLKTQAGLHLNPLSYFPQ (SEQ ID NO: 836) |
| ORF1/2 | MAWGYWWRRRFWRPRRRWRTWRRRRRLRPRRSRRTFRRTRRRKQSPETK |
| | SSKKARFQRKKSRYSPQKRSRKRRYSDSSSDSSSDSCASGSSSNSSNNNSSRR |
| | KRACT (SEQ ID NO: 837) |

TABLE N2
Novel Anellovirus nucleic acid sequence (Alphatorquevirus)

| Name | TTV-RTx2 |
|---|---|
| Genus/Clade | Alphatorquevirus, Clade 6 |
| Accession Number | SRR3479021 |
| Full Sequence: 3704 bp | |
| (SEQ ID NO: 838) | |
| Annotations: | |
| Putative Domain | Base range |
| TATA Box | 87 - 91 |
| Initiator Element | 105-120 |
| Transcriptional Start Site | 115 |
| 5′ UTR Conserved Domain | 175 - 245 |
| ORF2 | 342 - 728 |
| ORF2/2 | 342 - 724 ; 2414 - 2849 |
| ORF2/3 | 342 - 724 ; 2643 - 3057 |
| ORF1 | 599 - 2887 |
| ORF1/1 | 599 - 724 ; 2414 - 2887 |
| ORF1/2 | 599 - 724 ; 2643 - 2849 |
| Three open-reading frame region | 2626 - 2846 |
| Poly(A) Signal | 3052 - 3058 |

TABLE A2
Novel Anellovirus amino acid sequences (Alphatorquevirus, Clade 6)
TTV-RTx2 (Alphatorquevirus Clade 6)

| | |
|---|---|
| ORF2 | MSVWLPPIDNVTERERSWLSSILQSHRAFCGCHDAIYHLSSLAARFNMQPGP |
| | SPGGDSRPPRPPLRRLPALPGPRDPPSDTNNRRSWPTGDGGDGGAGQGAGG |
| | GATATEEDYRAEDLDELYAALEGDE (SEQ ID NO: 839) |
| ORF2/2 | MSVWLPPIDNVTERERSWLSSILQSHRAFCGCHDAIYHLSSLAARFNMQPGP |
| | SPGGDSRPPRPPLRRLPALPGPRDPPSDTNNRRSWPTGDGGDGGAGQGAGG |
| | GATATEEDYRAEDLDELYAALEGDERSETHAPRTDIPVPVDSLETYKWLTR |
| | SKWAPGSCSTPGTGAEATLAQQLSKELESNRSIMKLIRTAQRDLESFLPQKE |
| | TSSPEVEKKTHFQRKKVPISRSKRGRNRKPRRYSSTSSDTSESSENSESDSEPC |
| | SKASKRRRRVST (SEQ ID NO: 840) |
| ORF2/3 | MSVWLPPIDNVTERERSWLSSILQSHRAFCGCHDAIYHLSSLAARFNMQPGP |
| | SPGGDSRPPRPPLRRLPALPGPRDPPSDTNNRRSWPTGDGGDGGAGQGAGG |
| | GATATEEDYRAEDLDELYAALEGDERRPARPKSRRRLIFRGRKSPYLVRRG |
| | AGTESPGGTAAPPPTPQKAARTPKATPSPVPKPPKDAGGSPRKSIIIQPACNQ |
| | VLMFPEMGPKPAPTAQDWQCEYETCKHWDRPPRKFLTDPPFYPWAPTTYN |
| | VSFKLNFK (SEQ ID NO: 841) |
| ORF1 | MAYWGWWRRRRWPRRRWRRYRYRRRLPRRRPRRAVRRPRRRRVRRRRG |
| | RGWYRGRRYSRRRYRRRYVRRKRKTLVWRQWQPQNIRKCRIRGIIPILICGH |
| | GRGARNYALHSDDITPQNTPFGGGLSTTSWSLKVLYDQHTRGLNRWSASNE |
| | SLDLARYNGCSFTFYRDKKTDFIVTYDTSAPYKLDKYSSPSYHPGSMMLMT |
| | KHKILIPSFDTKPKGPAKIRVRIKPPKMFLDKWYTQDDLCSVNLVSLAVSAA |
| | SFTHPFCPPLTDTPCVTLQVLKDFYYTTIGYSSNADKVESVFTNTLYKHCCY |
| | YQSFLTTQFIAKITRTPDGQPVATFSPPTSFPGTTVTKSSIESFNQWVTSTGTS |
| | GWLTNANQHFHFCNYKPDATKLKWLRQYYFDWETYKLADVKPDGLTPSV |
| | NWYEYRIGLFSPIFLSPFRSSSLDFPRAYQDVNYNPLVDKGVGNIIWFQYNTK |
| | PDTQLSVPSCKCVIEDKPLWAAFYGYSDFVQQEIGDYTDAEAVGFVCVICPY |
| | TKPPLKNPDNPMQGFIFYDSLFGNGKWIDGTGHVPLYWQSRWRPEMLFQE |
| | NTMRDITLSGPFSYKDDYKNCVLTCKYKFNFRFGGNLLHEQTIRNPCPTDGH |
| | PSTGRQPRDVQVVDPIKVGPRFVFHSWDWRRGYLSPAALKRIGEQPLDYEA |
| | YSYRPKRPRIFPPTEGDQLARSREEDSFSEEESPHISFEEGQEPKAQAVQQHLL |
| | RHLRKQRELRKRLRALFQSLQKTQAGLHVNPLLFNQPAIRF (SEQ ID NO: |
| | 842) |
| ORF1/1 | MAYWGWWRRRRWPRRRWRRYRYRRRLPRRRPRRAVRRPRRRRTIRNPCP |
| | TDGHPSTGRQPRDVQVVDPIKVGPRFVFHSWDWRRGYLSPAALKRIGEQPL |
| | DYEAYSYRPKRPRIFPPTEGDQLARSREEDSFSEEESPHISFEEGQEPKAQAV |
| | QQHLLRHLRKQRELRKRLRALFQSLQKTQAGLHVNPLLFNQPAIRF (SEQ ID |
| | NO: 843) |
| ORF1/2 | MAYWGWWRRRRWPRRRWRRYRYRRRLPRRRPRRAVRRPRRRRKETSSPE |
| | VEKKTHFQRKKVPISRSKRGRNRKPRRYSSTSSDTSESSENSESDSEPCSKAS |
| | KRRRRVST (SEQ ID NO: 844) |

TABLE N3
Novel Anellovirus nucleic acid sequence (Alphatorquevirus)

| Name | TTV-RTx3 |
|---|---|
| Genus/Clade | Alphatorquevirus, Clade 4 |
| Accession Number | SRR3479781 |
| Full Sequence: 3653 bp | |
| (SEQ ID NO: 845) | |
| Annotations: | |
| Putative Domain | Base range |
| TATA Box | 50 - 55 |
| Initiator Element | 68-83 |
| Transcriptional Start Site | 78 |
| 5′ UTR Conserved Domain | 138 - 208 |
| ORF2 | 305 - 691 |
| ORF2/2 | 305 - 687 ; 2422 - 2878 |
| ORF2/3 | 305 - 687 ; 2564 - 3317 |
| ORF2t/3 | 305 - 360 ; 2564 - 3317 |
| ORF1 | 556 - 2904 |
| ORF1/1 | 556 - 687 ; 2422 - 2904 |
| ORF1/2 | 556 - 687 ; 2564 - 2878 |
| Three open-reading frame region | 2626 - 2846 |
| Poly(A) Signal | 3316 - 3319 |

TABLE A3
Novel Anellovirus amino acid sequences (Alphatorquevirus, Clade 4)
TTV-RTx3 (Alphatorquevirus Clade 4)

| | |
|---|---|
| ORF2 | MSSTWRVPRGDVSARELCWYRSVRESHDAFCGCRDPVFHLSRLAARSNHQ |
| | GPPTPPTDERPSASTPVRRLLPLPSYPGEGPQARWPGGDGEGAGGARGGAG |
| | DGGARAGEEEYRPEDLDELFDAIEQEQ (SEQ ID NO: 846) |
| ORF2/2 | MSSTWRVPRGDVSARELCWYRSVRESHDAFCGCRDPVFHLSRLAARSNHQ |
| | GPPTPPTDERPSASTPVRRLLPLPSYPGEGPQARWPGGDGEGAGGARGGAG |
| | DGGARAGEEEYRPEDLDELFDAIEQEQSSETRAKTPKYPDPVDSLAKYKSLT |
| | RNSLRRRGSSTRSTRDEECLLQELSNVCSSNQYLASMLLHHSGSRSSFPPQSS |
| | SEREKMQKAAQVHHPRDRDSGRKRPTRRKRSPRRGRRRRRGSSSSESSESSE |
| | SSTSNSSMSQYNSPKPKRTST (SEQ ID NO: 847) |
| ORF2/3 | MSSTWRVPRGDVSARELCWYRSVRESHDAFCGCRDPVFHLSRLAARSNHQ |
| | GPPTPPTDERPSASTPVRRLLPLPSYPGEGPQARWPGGDGEGAGGARGGAG |
| | DGGARAGEEEYRPEDLDELFDAIEQEQSYQTSAQATNTWRVCSYTTQGPAP |
| | LSLLRVPARGRRCRKRLRFTTQETATLAGRGQPDANGVLGGAGGDDEGAP |
| | RAKAQRAASPQPPTPACRSTTRQNPSEPPHKPPIILPALNKVYLFPPDKPTPIQ |
| | XXXXXXNTEFEACQAFDRPPRKYLSDTPTYPWLPVPNPEIKVSFKLGFKSYK |
| | AVGVSLVGVYLLRSLSTPSVSEECDPSPWCNALGGRALRLRLRAAPRTPAR |
| | ADALARVRPLRARGGREFC (SEQ ID NO: 848) |
| ORF2t/3 | MSSTWRVPRGDVSARELCWSYQTSAQATNTWRVCSYTTQGPAPLSLLRVP |
| | ARGRRCRKRLRFTTQETATLAGRGQPDANGVLGGAGGDDEGAPRAKAQR |
| | AASPQPPTPACRSTTRQNPSEPPHKPPIILPALNKVYLFPPDKPTPIQXXXXXX |
| | NTEFEACQAFDRPPRKYLSDTPTYPWLPVPNPEIKVSFKLGFKSYKAVGVSL |
| | VGVYLLRSLSTPSVSEECDPSPWCNALGGRALRLRLRAAPRTPARADALAR |
| | VRPLRARGGREFC (SEQ ID NO: 849) |
| ORF1 | MAWWGWRRRWWRPRRRWRWRRPRRRRRVPARRPRRAVRRYRTRTVRR |
| | RRRGWRRGYRRRYRLRRYRRRGRRRKKIVLTQWNPQTVRKCFIRGLMPVL |
| | WAGMGTGGHNYAVRSDDFVVDRGFGGSFATETFSLRVLFDQYQRGFNRW |
| | SHTNEDLDLARYTGCKWTFYRHQDTDFIVYFTNNPPMKTNQHTAPLTTPG |
| | MLMRSKYKILVPSFKTRPKGRKTVSVRVRPPKLFQDKWYTQQDLCPVPLVQ |
| | LNVTAADFTHPFGSPLTDTPCIRFQVLGNLYNKCLNIDLPQFDEDGEILTSTP |
| | YNRENKEDLKKLYKTLFVDEHAGNYWQTFLTNTMVKSHIDANQAKTYDQ |
| | EKTAAEQGKDPFPTNPPKDQFTTWNKKLVDPRDSNFLFATYHPKNIKKAIKT |
| | MRDNNFALTTGKNDIYGDYTAAYTRNTHMLDYYLGFYSPIFLSSGRSNTEF |
| | WTAYRDIVYNPLLDKGTGNMIWFQYHTKTDNIYKKPECHWEILDMPLWAL |
| | CNGYVEYLESQIKYGDILVEGKVLIRCPYTKPALVDPNNSLAGYVVENTTFG |
| | QGKWIDGKGYIPLHERSKWYVMLRYQTDVLHDIVTCGPWQYRDDNKNSQ |
| | LIAKYRFKFYWGGNMVHSQVIRNPCKDTQVSGPRRQPREVQVVDPQLITPP |
| | WVLHSFDQRRGMFTAGAIKRLLKQPIPGEYAPTPLRVPLLFPSSEFQREGED |
| | AESGSGSPPKRPRLWQEEANQTQTESSEGPAETTRELLERKLREQRVLNLQL |
| | QHVAVQLAKTQANLHINPLLYSQP (SEQ ID NO: 850) |
| ORF1/1 | MAWWGWRRRWWRPRRRWRWRRPRRRRRVPARRPRRAVRRYRTRTVIRN |
| | PCKDTQVSGPRRQPREVQVVDPQLITPPWVLHSFDQRRGMFTAGAIKRLLK |
| | QPIPGEYAPTPLRVPLLFPSSEFQREGEDAESGSGSPPKRPRLWQEEANQTQT |
| | ESSEGPAETTRELLERKLREQRVLNLQLQHVAVQLAKTQANLHINPLLYSQP |
| | (SEQ ID NO: 852) |
| ORF1/2 | MAWWGWRRRWWRPRRRWRWRRPRRRRRVPARRPRRAVRRYRTRTELSN |
| | VCSSNQYLASMLLHHSGSRSSFPPQSSSEREKMQKAAQVHHPRDRDSGRKR |
| | PTRRKRSPRRGRRRRRGSSSSESSESSESSTSNSSMSQYNSPKPKRTST (SEQ |
| | ID NO: 853) |

TABLE N4
Novel Anellovirus nucleic acid sequence (Alphatorquevirus)

| Name | TTV-RTx4 |
|---|---|
| Genus/Clade | Alphatorquevirus, Clade 4 |
| Accession Number | SRR3481579 |
| Full Sequence: 3742 bp | |
| (SEQ ID NO: 854) | |
| Annotations: | |
| Putative Domain | Base range |
| TATA Box | 86 - 90 |
| Initiator Element | 104 - 119 |
| Transcriptional Start Site | 114 |
| 5′ UTR Conserved Domain | 174 - 244 |
| ORF2 | 353 - 715 |
| ORF2/2 | 353 - 711 ; 2362 - 2863 |
| ORF2/3 | 353 - 711 ; 2555 - 3065 |
| ORF2t/3 | 353 - 432; 2555 - 3065 |
| ORF1 | 589 - 2889 |
| ORF1/1 | 589 - 711 ; 2362 - 2889 |
| ORF1/2 | 589 - 711 ; 2555 - 2863 |
| Three open-reading frame region | 2555 - 2863 |
| Poly(A) Signal | 3062 - 3066 |
| GC-rich region, or a portion thereof* | 3720 - 3742 |

TABLE A4
Novel Anellovirus amino acid sequences (Alphatorquevirus, Clade 4)
TTV-RTx4 (Alphatorquevirus Clade 4)

| ORF2 | MWTPPRNDQQYLNWQWYSSILSSHAAMCGCPDVVAHFNHLASVLRAPQN |
|---|---|
| | PPPPGPQRNLPLRRLPALPAAPEAPGDRAPWPMAGGAGGEDGGAGGDADH |
| | GGAAGGPEDADLLDAVAAAET (SEQ ID NO: 855) |
| ORF2/2 | MWTPPRNDQQYLNWQWYSSILSSHAAMCGCPDVVAHFNHLASVLRAPQN |
| | PPPPGPQRNLPLRRLPALPAAPEAPGDRAPWPMAGGAGGEDGGAGGDADH |
| | GGAAGGPEDADLLDAVAAAETLLEIPAKTPTPRSIESLEAYKSLTRNTTHRN |
| | SHSIRGTSDVASLARKLLRECNNNQQLLTFFQQAARDPGGTPRCTTPAKKGS |
| | KKKAYFSPQSSSSDESPRGKTRSRRKAGRKAQRKRRRPSPSSSSSSCSNSESW |
| | ESNSYSCSTKSKKSNKIKISTLPCYQGGGI (SEQ ID NO: 856) |
| ORF2/3 | MWTPPRNDQQYLNWQWYSSILSSHAAMCGCPDVVAHFNHLASVLRAPQN |
| | PPPPGPQRNLPLRRLPALPAAPEAPGDRAPWPMAGGAGGEDGGAGGDADH |
| | GGAAGGPEDADLLDAVAAAETPQETQEGHRGVPLQPRRGAKRKLTFPPSQ |
| | APQTSPPVGRLAAGGKRVAKLRGRDADRLPAAQAAAAATANPGSQTHTPV |
| | QPSPKNPTKSRYQPYLVTKGGGSSILISNSTINMFGDPKPYNPSSNDWKEEYE |
| | ACRIWDRPPRGNLRDTPFYPWAPKENQYRVNFKLGFQ (SEQ ID NO: 857) |
| ORF2t/3 | MWTPPRNDQQYLNWQWYSSILSSHAAMPQETQEGHRGVPLQPRRGAKRK |
| | LTFPPSQAPQTSPPVGRLAAGGKRVAKLRGRDADRLPAAQAAAAATANPGS |
| | QTHTPVQPSPKNPTKSRYQPYLVTKGGGSSILISNSTINMFGDPKPYNPSSND |
| | WKEEYEACRIWDRPPRGNLRDTPFYPWAPKENQYRVNFKLGFQ (SEQ ID |
| | NO: 858) |
| ORF1 | MAYGWWRRRRRRWRRWRRRPWRRRWRTRRRRPVRRRGRRRNVRRRRR |
| | GGRWRRRYRRWKRKGRRRKKAKIIIRQWQPNYRRRCNIVGYIPVLICGENT |
| | VSRNYATHSDDTNYPGPFGGGMTTDKFTLRILYDEYKRFMNYWTASNEDL |
| | DLCRYLGVNLYFFRHPEVDFIIKINTMPPFLDTELTAPSIHPGMLALDKRARW |
| | IPSLKSRPGKKHYIKIRVGAPKMFTDKWYPQTDLCDMVLLTVYATAADMQ |
| | YPFGSPLTDSVVVNFQVLQSMYDETISILPDQKEKRITLLTSIAFYNTTQTIAQ |
| | LKPFIDAGNMTSTTTATTWGSYINTTKFNTAATTTYTYPGSTTTTVTMLTCN |
| | DSWYRGTVYNDQIKNLPKEAAQLYLKATKTLLGNTFTNDDHTLEYHGGLY |
| | SSIWLSPGRSYFETPGAYTDIKYNPFTDRGEGNMLWIDWLSKKNMNYDKLQ |
| | SKCLISDLPLWAAAYGYLEFCAKSTGDQNIHMNARLLIRSPFTDPQLLVHTN |
| | PTKGFVPYSLNFGNGKMPGGSSNVPIRMRAKWYPTLFHQQEVLEALAQSGP |
| | FAYHSDIKKVSLGMKYRFKWIWGGNPVRQQVVRNPCKDSHSSVNRVPRSL |
| | QIVDPKYNSPELTFHTWDFRRGLFGQKAIERMQQQPTTTDIFSAGRKRPRRD |
| | TEVYHSSQEGEQKESLLFPPVKLLRRVPPWEDSQQEESGSQSSEEETQTVSQ |
| | QLKQQLQQQRILGVKLILLFNQVQKIQQNQDINPTLLPRGGDLASLFQIAP |
| | (SEQ ID NO: 859) |
| ORF1/1 | MAYGWWRRRRRRWRRWRRRPWRRRWRTRRRRPVRRRGRRRNVVRNPC |
| | KDSHSSVNRVPRSLQIVDPKYNSPELTFHTWDFRRGLFGQKAIERMQQQPTT |
| | TDIFSAGRKRPRRDTEVYHSSQEGEQKESLLFPPVKLLRRVPPWEDSQQEES |
| | GSQSSEEETQTVSQQLKQQLQQQRILGVKLILLFNQVQKIQQNQDINPTLLPR |
| | GGDLASLFQIAP (SEQ ID NO: 860) |
| ORF1/2 | MAYGWWRRRRRRWRRWRRRPWRRRWRTRRRRPVRRRGRRRNAARDPG |
| | GTPRCTTPAKKGSKKKAYFSPQSSSSDESPRGKTRSRRKAGRKAQRKRRRPS |
| | PSSSSSSCSNSESWESNSYSCSTKSKKSNKIKISTLPCYQGGGI (SEQ ID NO: |
| | 861) |

TABLE N5
Novel Anellovirus nucleic acid sequence (Alphatorquevirus)

| Name | TTV-RTx5b |
|---|---|
| Genus/Clade | Alphatorquevirus, Clade 5 |
| Accession Number | SRR3481639 |
| Full Sequence: 3553 bp | |
| (SEQ ID NO: 862) | |
| Annotations: | |
| Putative Domain | Base range |
| TATA Box | 12 - 17 |
| Initiator Element | 30 - 45 |
| Transcriptional Start Site | 40 |
| 5′ UTR Conserved Domain | 100 - 171 |
| ORF2 | 272 - 637 |
| ORF2/2 | 272 - 633 ; 2326 - 2767 |
| ORF2/3 | 272 - 633 ; 2525 - 2984 |
| ORF2t/3 | 272 - 633 ; 2525 - 2984 |
| ORF1 | 511 - 2793 |
| ORF1/1 | 511 - 711 ; 2326 - 2793 |
| ORF1/2 | 511 - 711 ; 2525 - 2767 |
| Three open-reading frame region | 2525 - 2767 |
| Poly(A) Signal | 2981 - 2985 |
| Unknown sequence | 3125-3176 |
| *Note: Modifications made to maintain | |
| reading frames: | |
| “C” inserted into ORF2 | 430 |
| “N” inserted into ORF1 | 1842 |

TABLE A5
Novel Anellovirus amino acid sequences (Alphatorquevirus, Clade 5)
TTV-RTx5b (Alphatorquevirus Clade 5)

| | |
|---|---|
| ORF2 | MSWRPPVHNPNGIERNLWEAFFRMHASACGCGDLVGHLTVLAGRYGAPPR |
| | PPAPGAPRPPLIRQLALPAPPADPQQANPQWPGGDGGEDGAGGPAAGGAVA |
| | DAEYQEDELNALFDAVEQEE (SEQ ID NO: 863) |
| ORF2/2 | MSWRPPVHNPNGIERNLWEAFFRMHASACGCGDLVGHLTVLAGRYGAPPR |
| | PPAPGAPRPPLIRQLALPAPPADPQQANPQWPGGDGGEDGAGGPAAGGAVA |
| | DAEYQEDELNALFDAVEQEELLKTPAQTAGYDLHPVESVAQYKSLARSQW |
| | GQSTYSTGGTGDGGSLIKKLSKECLKNQLMMESIQQAQRSLDGFPHSTTKSK |
| | KAPQVQRRQGRSPRKKKPLKKPSKKSKRRRYSSTSSSSTESSDGSESNSNSSC |
| | CSSPRRRATCT (SEQ ID NO: 864) |
| ORF2/3 | MSWRPPVHNPNGIERNLWEAFFRMHASACGCGDLVGHLTVLAGRYGAPPR |
| | PPAPGAPRPPLIRQLALPAPPADPQQANPQWPGGDGGEDGAGGPAAGGAVA |
| | DAEYQEDELNALFDAVEQEEPKGPSMVSPTRQPRARRRLRFRGDKVAVLAR |
| | RSRSRSPPRSPRGVATAAPPPAVPRAATDRKATPTRHAAAHQDAEQPAHKP |
| | PCSWPCINKVYMFPPDKPMPIHGYHGWETEYQACKAFNRPPRNYLSDKPIY |
| | PWLPRPEPEIIVSFRFGFK (SEQ ID NO: 865) |
| ORF2t/3 | MSWRPPVHNPNGIERNLWEAFFRMHASACGCGDLVGHLTVLAGRPKGPSM |
| | VSPTRQPRARRRLRFRGDKVAVLARRSRSRSPPRSPRGVATAAPPPAVPRAA |
| | TDRKATPTRHAAAHQDAEQPAHKPPCSWPCINKVYMFPPDKPMPIHGYHG |
| | WETEYQACKAFNRPPRNYLSDKPIYPWLPRPEPEIIVSFRFGFK (SEQ ID NO: |
| | 866) |
| ORF1 | MAWWGRWRRWRWRPRRWRRRRRRRVPRRRAQRPVRRRRARRVRRRRW |
| | GRRRWRRGYRRRLRLRRRRRRKRKIVLTQWNPAKVRRCTIKGVLPMILCG |
| | AGRSGFNYGLHSDDYTVQKPLGQNPHGGGMSTVTFSLQVLYDQYQRFMN |
| | KWSYSNDQLDLARYFGCTFWFYRHPEVDFVAQFDNVPPMKMDENTAPNT |
| | HPSFLLQNKHKVKIPSFKTKPFGKKRVRVTVGPPKLFEDKWYSQHDLCKVP |
| | LVSWRLTAADFRFPFCSPQTDNPCYTFQVLHEEYYPVIGTSALENGSNYNSS |
| | AITALEKFLYEKCTHYQTFATDTRLNPQRPVSSTNANKTYTPSGSQETIVWG |
| | QSDFNLFKKHTDSNYGYCTYCPTNDLATKIKKYRDKRFDWLTNMPVTNTC |
| | HINATFARGKIKEWEYHLGWFSNIFIGNLRHNLAFRAAYIDITXTDKGEGNII |
| | WFQYLTKPTTEYIEAQAKCSITNIPLYAAFYGYEDYLQRTLGPYQDVETLGII |
| | CVKCPYTDPPLVHKSTDKKNWGYVFYDVHFGNGKTPEGLGQVHPYWMQR |
| | WRPYVQFQKDTMNKIARTGPFSYRDETPSITLTAGYKFHFNWGGDSIFPQIIK |
| | NPCPDSGVRPSSSRERRSVQVVSPLTMGPEYIFHRWDWRRGFFNQKALKRM |
| | LEKSINDGEYPTGPKVPRWFPPLDNQEQEGASGSEETRSQSSQEEAAQEALQ |
| | EVQEASLQQHLLQQYREQRRIGKQLQLVMLQLTKTQSNLHINPRVLGHA |
| | (SEQ ID NO: 867) |
| ORF1/1 | MAWWGRWRRWRWRPRRWRRRRRRRVPRRRAQRPVRRRRARRIIKNPCPD |
| | SGVRPSSSRERRSVQVVSPLTMGPEYIFHRWDWRRGFFNQKALKRMLEKSI |
| | NDGEYPTGPKVPRWFPPLDNQEQEGASGSEETRSQSSQEEAAQEALQEVQE |
| | ASLQQHLLQQYREQRRIGKQLQLVMLQLTKTQSNLHINPRVLGHA (SEQ ID |
| | NO: 868) |
| ORF1/2 | MAWWGRWRRWRWRPRRWRRRRRRRVPRRRAQRPVRRRRARRAQRSLDG |
| | FPHSTTKSKKAPQVQRRQGRSPRKKKPLKKPSKKSKRRRYSSTSSSSTESSD |
| | GSESNSNSSCCSSPRRRATCT (SEQ ID NO: 869) |

TABLE N6
Novel Anellovirus nucleic acid sequence (Alphatorquevirus)

| | |
|---|---|
| Name | TTV-RTx6 |
| Genus/Clade | Alphatorquevirus, Clade 5 |
| Accession Number | SRR3438066 |
| Full Sequence: 3896 bp | |

(SEQ ID NO: 870)
Annotations:

| Putative Domain | Base range |
|---|---|
| TATA Box | 206-210 |
| Initiator Element | 224-239 |
| Transcriptional Start Site | 234 |
| 5′ UTR Conserved Domain | 294-364 |
| ORF2 | 465-830 |
| ORF2/2 | 465-826; 2534-2975 |
| ORF2/3 | 465-826; 2721-3192 |
| ORF2t/3 | 465-595; 2721-3192 |
| ORF1 | 704-3001 |
| ORF1/1 | 704-826; 2534-3001 |
| ORF1/2 | 704-826; 2721-2975 |
| Three open-reading frame region | 2721-2975 |
| Poly(A) Signal | 3189-3193 |
| Unknown sequence | 3198-3655 |
| GC-rich region, or a portion thereof** | 3844-3895 |

TABLE A6
Novel Anellovirus amino acid sequences (Alphatorquevirus, Clade 5)
TTV-RTx6 (Alphatorquevirus Clade 5)

| | |
|---|---|
| ORF2 | MSWRPPVHNPNGIQRNLWEAFFRMHAAACGCGDLVGHITVLAGRYGAPPR |
| | PPAPGAPRPPLIRQLALPAPPADPQQANPQWPGGDGGEDGAGGPAAGGAVA |
| | DAEYQEDELNALFDAVEQEE (SEQ ID NO: 871) |
| ORF2/2 | MSWRPPVHNPNGIQRNLWEAFFRMHAAACGCGDLVGHITVLAGRYGAPPR |
| | PPAPGAPRPPLIRQLALPAPPADPQQANPQWPGGDGGEDGAGGPAAGGAVA |
| | DAEYQEDELNALFDAVEQEELLKTPAQTPGFDLQPVETVAQYKSLARSQW |
| | DPSLYSTHGTGDGGSLIKKLSKECLKNQLMMENIQQAQRCLDGFPHSTTKS |
| | KKASQIQRRQPRSPRKKKPLKKPSKKSKRRRYSSTSSSSTESSEESESNSNSSC |
| | SNSPRRRATCT (SEQ ID NO: 872) |
| ORF2/3 | MSWRPPVHNPNGIQRNLWEAFFRMHAAACGCGDLVGHITVLAGRYGAPPR |
| | PPAPGAPRPPLIRQLALPAPPADPQQANPQWPGGDGGEDGAGGPAAGGAVA |
| | DAEYQEDELNALFDAVEQEEISNRPKGASMVSPTRQPRARRRLRYRDDNLA |
| | VLARRSRSRSPPRSPRGVATAAPPPAVPRAAKNRKATPTRHAPTHQDAEQP |
| | AHKSPCPWPCINKVYMFPPEKPMPIHGYHGWETEYQACKAFDRPPRNYLSD |
| | KPIYPWLPRSQPEFKVSFKLGCQ (SEQ ID NO: 873) |
| ORF2t/3 | MSWRPPVHNPNGIQRNLWEAFFRMHAAACGCGDLVGHITVLAGRISNRPK |
| | GASMVSPTRQPRARRRLRYRDDNLAVLARRSRSRSPPRSPRGVATAAPPPA |
| | VPRAAKNRKATPTRHAPTHQDAEQPAHKSPCPWPCINKVYMFPPEKPMPIH |
| | GYHGWETEYQACKAFDRPPRNYLSDKPIYPWLPRSQPEFKVSFKLGCQ |
| | (SEQ ID NO: 874) |
| ORF1 | MAWWGRWRRWRWRPRRWRRRRRRRVPRRRAQRPVRRRRARRVRRRRW |
| | GRRRWRRGYRRRLRLRRRRRRKKIRLTQWNPAKVRRCTIKGVLPMILCGA |
| | GRSGFNYGLHSDDYTVQKPLGQNPHGGGMSTVTFSLQVLFDQYQRFMNR |
| | WSYSNDQLDLARYFGCTFYFYRHPEIDFVAQYDNVPPMKMDENTAPNTHP |
| | SFLLQNKRKIKIPSFKTKPFGRKRVKVTVGPPKLFEDKWYSQHDLCKVPLVS |
| | WRLTACDFRFPFCSPLTDNPCYTFQVLHENYYPVIGTSSLENGTNYNNTAIT |
| | TLETWLYGKCTHYQTFATDTRLNPQRPVSSSNANETYTPSGSKESIIWGQSD |
| | WANFKKNTDSNYGYCSYCPSNGTNGTVDKIKKYRDQRFRWLTEMPVPNTC |
| | HIHATFARGTIKYWEYHLGWYSNIFIGNLRHNLAFRPAYIDITYNPITDKGEG |
| | NIIWFQYLTKPTTEYIETQAKCTITNIPLYAAFYGYEDYLQRTLGPYQDVETL |
| | GIICVKCPYTDPPLVHKDKSKTNWGYVFYDAHFGNGKTPEGLGQVHPYWM |
| | QRWRPYVQFQKDTMHKISRTGPFSYRDDTPSITLTAEYKFRFNWGGDSIFPQ |
| | IIKNPCPDTGVRPSTGRDRRSVQVVSPLTMGPQFIFHSWDWRRGFFNQKTLK |
| | RMLEKPVNDGEYPTGPKVPRWFPPLDNQEQEGVSDTETTTSQSSQEEAAQE |
| | ALQEVQEASLQQHLLQQYREQRRIGKQLQLVMLQLTKTQSNLHINPRVLGH |
| | A (SEQ ID NO: 875) |
| ORF1/1 | MAWWGRWRRWRWRPRRWRRRRRRRVPRRRAQRPVRRRRARRIIKNPCPD |
| | TGVRPSTGRDRRSVQVVSPLTMGPQFIFHSWDWRRGFFNQKTLKRMLEKPV |
| | NDGEYPTGPKVPRWFPPLDNQEQEGVSDTETTTSQSSQEEAAQEALQEVQE |
| | ASLQQHLLQQYREQRRIGKQLQLVMLQLTKTQSNLHINPRVLGHA (SEQ ID |
| | NO: 876) |
| ORF1/2 | MAWWGRWRRWRWRPRRWRRRRRRRVPRRRAQRPVRRRRARRNIQQAQR |
| | CLDGFPHSTTKSKKASQIQRRQPRSPRKKKPLKKPSKKSKRRRYSSTSSSSTE |
| | SSEESESNSNSSCSNSPRRRATCT (SEQ ID NO: 877) |

TABLE N7
Exemplary Anellovirus nucleic acid
sequence (Alphatorquevirus, Clade 1)

| | |
|---|---|
| Name | TTV-CT30F |
| Genus/Clade | Alphatorquevirus, Clade 1 |
| Accession Number | AB064597.1 |
| Full Sequence: 3570 bp | |

(SEQ ID NO: 1)
Annotations:

| Putative Domain | Base range |
|---|---|
| TATA Box | 84-90 |
| Cap Site | 107-114 |
| Transcriptional Start Site | 114 |
| 5′ UTR Conserved Domain | 177-247 |
| ORF2 | 299-691 |
| ORF2/2 | 299-687; 2137-2659 |
| ORF2/3 | 299-687; 2339-2831 |
| ORF2t/3 | 299-348; 2339-2831 |
| ORF1 | 571-2613 |
| ORF1/1 | 571-687; 2137-2613 |
| ORF1/2 | 571-687; 2339-2659 |
| Three open-reading frame region | 2325-2610 |
| Poly(A) Signal | 2813-2818 |
| GC-rich region | 3415-3570 |

TABLE A7
Exemplary Anellovirus amino acid sequences (Alphatorquevirus, Clade 1)
TTV-CT30F (Alphatorquevirus Clade 1)

| ORF2 | MPWRPPVHSVQGREDQWFASFFHGHASFCGCGDAVGHLNSIAPRFPRAGPP |
|---|---|
| | RPPPGLEQPNPPQQGPAGPGGPPAILALPAPPAEPDDPQPRRGGGDGGAAAG |
| | AAGDRGDRDYDEEELDELFRAAAEDDL (SEQ ID NO: 2) |
| ORF2/2 | MPWRPPVHSVQGREDQWFASFFHGHASFCGCGDAVGHLNSIAPRFPRAGPP |
| | RPPPGLEQPNPPQQGPAGPGGPPAILALPAPPAEPDDPQPRRGGGDGGAAAG |
| | AAGDRGDRDYDEEELDELFRAAAEDDFQSTTPASREPTRFPTPISTLASYKC |
| | RTRNCSDRGQCSTSGTSDVGSLAKEVLKECQNTHRMMNLLRQVSHQSETSS |
| | TRPSEEKTQSKKNAILSSKHSRKKRPQKKKNQHPKKKPRKRSYSTSSSSRDA |
| | TSESSDEGSSSSLQTSSDSARESTGTPSSHRAPTLHTRPTFSQYW (SEQ ID NO: |
| | 3) |
| ORF2/3 | MPWRPPVHSVQGREDQWFASFFHGHASFCGCGDAVGHLNSIAPRFPRAGPP |
| | RPPPGLEQPNPPQQGPAGPGGPPAILALPAPPAEPDDPQPRRGGGDGGAAAG |
| | AAGDRGDRDYDEEELDELFRAAAEDDLSPIKAKQARLGLQRRKPRAKRML |
| | FSPQSTRGRRDPRRRRTSTPRKSPERGATPPAPAPETPPASPQTRAQARLYRH |
| | PPTPPGSPLEPRAHIEPPPYIPDLLFPNTGKKKKFSPFDWETEAQLAGIFKRPM |
| | RFYPSDTPHYPWLPPKRDIPKICNINFKIKLQE (SEQ ID NO: 4) |
| ORF2t/3 | MPWRPPVHSVQGREDQWSPIKAKQARLGLQRRKPRAKRMLFSPQSTRGRR |
| | DPRRRRTSTPRKSPERGATPPAPAPETPPASPQTRAQARLYRHPPTPPGSPLEP |
| | RAHIEPPPYIPDLLFPNTGKKKKFSPFDWETEAQLAGIFKRPMRFYPSDTPHY |
| | PWLPPKRDIPKICNINFKIKLQE (SEQ ID NO: 5) |
| ORF1 | TAWWWGRWRRRWRRRRPWRPRLRRRRARRAFPRRRRRRFVSRRWRRPY |
| | RRRRRRGRRRRRRRRRHKPTLVLRQWQPDVIRHCKITGRMPLIICGKGSTQF |
| | NYITHADDITPRGASYGGNFTNMTFSLEAIYEQFLYHRNRWSASNHDLELCR |
| | YKGTTLKLYRHPDVDYIVTYSRTGPFEISHMTYLSTHPLLMLLNKHHIVVPS |
| | LKTKPRGRKAIKVRIRPPKLMNNKWYFTRDFCNIGLFQLWATGLELRNPWL |
| | RMSTLSPCIGFNVLKNSIYTNLSNLPQHREDRLNIINNTLHPHDITGPNNKKW |
| | QYTYTKLMAPIYYSANRASTYDLLREYGLYSPYYLNPTRINLDWMTPYTHV |
| | RYNPLVDKGFGNRIYIQWCSEADVSYNRTKSKCLLQDMPLFFMCYGYIDW |
| | AIKNTGVSSLARDARICIRCPYTEPQLVGSTEDIGFVPITETFMRGDMPVLAP |
| | YIPLSWFCKWYPNIAHQKEVLEAIISCSPFMPRDQGMNGWDITIGYKMDFL |
| | WGGSPLPSQPIDDPCQQGTHPIPDPDKHPRLLQVSNPKLLGPRTVFHKWDIR |
| | RGQFSKRSIKRVSEYSSDDESLAPGLPSKRNKLDSAFRGENPEQKECYSLLK |
| | ALEEEETPEEEEPAPQEKAQKEELLHQLQLQRRHQRVLRRGLKLVFTDILRL |
| | RQGVHWNPELT (SEQ ID NO: 6) |
| ORF1/1 | TAWWWGRWRRRWRRRRPWRPRLRRRRARRAFPRRRRRRFPIDDPCQQGT |
| | HPIPDPDKHPRLLQVSNPKLLGPRTVFHKWDIRRGQFSKRSIKRVSEYSSDDE |
| | SLAPGLPSKRNKLDSAFRGENPEQKECYSLLKALEEEETPEEEEPAPQEKAQ |
| | KEELLHQLQLQRRHQRVLRRGLKLVFTDILRLRQGVHWNPELT (SEQ ID |
| | NO: 7) |
| ORF1/2 | TAWWWGRWRRRWRRRRPWRPRLRRRRARRAFPRRRRRRFVSHQSETSST |
| | RPSEEKTQSKKNAILSSKHSRKKRPQKKKNQHPKKKPRKRSYSTSSSSRDAT |
| | SESSDEGSSSSLQTSSDSARESTGTPSSHRAPTLHTRPTFSQYW (SEQ ID NO: |
| | 8) |

TABLE N8
Exemplary Anellovirus nucleic acid
sequence (Alphatorquevirus, Clade 2)

| | |
|---|---|
| Name | TTV-P13-1 |
| Genus/Clade | Alphatorquevirus, Clade 2 |
| Accession Number | KT163896.1 |
| Full Sequence: 3451 bp | |

(SEQ ID NO: 9)
Annotations:

| Putative Domain | Base range |
|---|---|
| TATA Box | 112-119 |
| Initiator Element | 128-148 |
| Transcriptional Start Site | 148 |
| 5′ UTR Conserved Domain | 204-273 |
| ORF2 | 412-912 |
| ORF2/2 | 412-908; 2490-3039 |
| ORF2/3 | 412-908; 2725-3208 |
| ORF1 | 729-2972 |
| ORF1/1 | 729-908; 2490-2972 |
| ORF1/2 | 729-908; 2725-3039 |
| Three open-reading frame region | 2699-2969 |
| Poly(A) Signal | 3220-3225 |
| GC-rich region | 3302-3541 |

TABLE A8
Exemplary Anellovirus amino acid sequences (Alphatorquevirus, Clade 2)
TTV-P13-1 (Alphatorquevirus Clade 2)

| | |
|---|---|
| ORF2 | MASGRRGWMPPDLTVQEREDAWWTSFCASHRSFCSCDDPVGHINTLARDN |
| | SPLAQTPTTTSGQGPPPPPTPPRTPGPRPGSAPDQGGRIRASWTYPLAPGGPG |
| | STPWPTGGAGDAGGAAGGGAGVLSAAAGGGGEGDAGPEGAGGGEGDDV |
| | RDLLAAIEGDVGADG (SEQ ID NO: 10) |
| ORF2/2 | MASGRRGWMPPDLTVQEREDAWWTSFCASHRSFCSCDDPVGHINTLARDN |
| | SPLAQTPTTTSGQGPPPPPTPPRTPGPRPGSAPDQGGRIRASWTYPLAPGGPG |
| | STPWPTGGAGDAGGAAGGGAGVLSAAAGGGGEGDAGPEGAGGGEGDDV |
| | RDLLAAIEGDVGADGPWKTPVRKAPSSFPEPVASLAYYKSATRPSRPPRQPG |
| | TRGTGDDPSLQRRVLKECANNNHMMNCLIRALKSQNCPFPQGPPSPVPPSPP |
| | PGGKQNRSPRQTSARRRPKQKPTKRKRRSRRRESSSSSCGSSNSCKSDSWES |
| | CSSNSSDSDRGRRSTRASYNSWAPEPVPAFPGAGPSKSAYF (SEQ ID NO: 11) |
| ORF2/3 | MASGRRGWMPPDLTVQEREDAWWTSFCASHRSFCSCDDPVGHINTLARDN |
| | SPLAQTPTTTSGQGPPPPPTPPRTPGPRPGSAPDQGGRIRASWTYPLAPGGPG |
| | STPWPTGGAGDAGGAAGGGAGVLSAAAGGGGEGDAGPEGAGGGEGDDV |
| | RDLLAAIEGDVGADGARRPRCRRRLLLVGNKTGHLARRQRDGDRSRSPPRG |
| | RDGAGGGSPAPAAVGAATPAKATAGSRVPATPPTQTGGGDPPGPRIIPGPQN |
| | PYLLFPEQAPPKVPIFDPFGQKTELELCGCFDRPPRNNPYDHPFYPWLPKEPP |
| | SYYQGYKVSFKLGFHPDKHV (SEQ ID NO: 12) |
| ORF1 | MAYWWGRRRRWRRWRRRRRPLRRRRRWRRRRRWPRRRRWRRRRRRARP |
| | ARRYRRRRGRRRVRRRRRPQKLVLTQWNPQTVRKCVIRGFLPLFFCGQGAY |
| | HRNFTDHYDDVFPKGPSGGGHGSMVFNLSFLYQEFKKHHNKWSRSNLDFD |
| | LVRYKGTVIKLYRHQDFDYIVWISRTPPFQESLLTVMTHQPSVMLQAKKCII |
| | VKSYRTHPGGKPYVTAKVRPPRLLTDKWYFQSDFCNVPLFSLQFALAELRF |
| | PICSPQTDTNCINFLVLDDIYYKFLDNKPKQSSDPNDENRIKFWHGLWSTMR |
| | YLNTTYINTLFPGTDSLVAAKDTDNSVNKYPSTATKQPYKDSQYMQNIWNT |
| | SKIHALYTWVAETNYKRLQAYYTQTYGGYQRQFFTGKQYWDYRVGMFSP |
| | AFLSPSRLNPQNPGAYTEVSYNPWTDEGTGNVVCLQYLTKETSDYKPGGGS |
| | KFCIEGVPLWAALVGYVDMCKKEGKDPGIRLNCLLLVKCPYTKPQLYDKK |
| | NPEKLFVPYSYNFGHGKMPGGDKYIPIEFKDRWYPCLLHQEEWIEDIVRSGP |
| | FVPKDMPSSVTCMMRYSSLFNWGGNIIQEQAVEDPCKKGTFVVPGTSGIARI |
| | LQVSNPAKQTPTTTWHSWDWRRSLFTETGLKRMREQQPYDELSYTGPKKP |
| | KLSLPAGPAVPGAAVASSWWETKQVTSPDVSETETEAEAHQEEETEPEEGV |
| | QLQQLWEQQLLQKRQLGVVFQQLLRLRQGAEIHPGLV (SEQ ID NO: 13) |
| ORF1/1 | MAYWWGRRRRWRRWRRRRRPLRRRRRWRRRRRWPRRRRWRRRRRRARP |
| | ARRYRRRRGRRRAVEDPCKKGTFVVPGTSGIARILQVSNPAKQTPTTTWHS |
| | WDWRRSLFTETGLKRMREQQPYDELSYTGPKKPKLSLPAGPAVPGAAVASS |
| | WWETKQVTSPDVSETETEAEAHQEEETEPEEGVQLQQLWEQQLLQKRQLG |
| | VVFQQLLRLRQGAEIHPGLV (SEQ ID NO: 14) |
| ORF1/2 | MAYWWGRRRRWRRWRRRRRPLRRRRRWRRRRRWPRRRRWRRRRRRARP |
| | ARRYRRRRGRRRGPPSPVPPSPPPGGKQNRSPRQTSARRRPKQKPTKRKRRS |
| | RRRESSSSSCGSSNSCKSDSWESCSSNSSDSDRGRRSTRASYNSWAPEPVPAF |
| | PGAGPSKSAYF (SEQ ID NO: 15) |

TABLE N9
Exemplary Anellovirus nucleic acid
sequence (Alphatorquevirus, Clade 3)

| | |
|---|---|
| Name | Ring1 |
| Genus/Clade | Alphatorquevirus, Clade 3 |
| Accession Number | AJ620231.1 |
| Full Sequence: 3753 bp | |

(SEQ ID NO: 16)
Annotations:

| Putative Domain | Base range |
|---|---|
| TATA Box | 83-88 |
| Cap Site | 104-111 |
| Transcriptional Start Site | 111 |
| 5′ UTR Conserved Domain | 170-240 |
| ORF2 | 336-719 |
| ORF2/2 | 336-715; 2363-2789 |
| ORF2/3 | 336-715; 2565-3015 |
| ORF2t/3 | 336-388; 2565-3015 |
| ORF1 | 599-2830 |
| ORF1/1 | 599-715; 2363-2830 |
| ORF1/2 | 599-715; 2565-2789 |
| Three open-reading frame region | 2551-2786 |
| Poly(A) Signal | 3011-3016 |
| GC-rich region | 3632-3753 |

TABLE A9
Exemplary Anellovirus amino acid sequences (Alphatorquevirus, Clade 3)
Ring1 (Alphatorquevirus Clade 3)

| | |
|---|---|
| ORF2 | MSFWKPPVHNVTGIQRMWYESFHRGHASFCGCGNPILHITALAETYGHPTG |
| | PRPSGPPGVDPNPHIRRARPAPAAPEPSQVDSRPALTWHGDGGSDGGAGGS |
| | GSGGPVADFADDGLDQLVAALDDEE (SEQ ID NO: 17) |
| ORF2/2 | MSFWKPPVHNVTGIQRMWYESFHRGHASFCGCGNPILHITALAETYGHPTG |
| | PRPSGPPGVDPNPHIRRARPAPAAPEPSQVDSRPALTWHGDGGSDGGAGGS |
| | GSGGPVADFADDGLDQLVAALDDEELLKTPASSPPMKYPVPVTSLEEYKSS |
| | TRGSWDRTTRSGHGTCADTHLAEQVLRECQNNKKLLTLYSQAQKSLGSTS |
| | QNKKPKKKAHIHSKENRDRGRPRKKARQKPSRKRAKRSPSNSSCSSSTKSSS |
| | SSDRESKSSSSSS (SEQ ID NO: 18) |
| ORF2/3 | MSFWKPPVHNVTGIQRMWYESFHRGHASFCGCGNPILHITALAETYGHPTG |
| | PRPSGPPGVDPNPHIRRARPAPAAPEPSQVDSRPALTWHGDGGSDGGAGGS |
| | GSGGPVADFADDGLDQLVAALDDEEPKKASGRHPKTRNPRRKLTFTPKRIE |
| | TVGDRGRKRDRSPLAREPRGPLPTAVAAAVPRAAQAQTGNQSPLRAAHKD |
| | PTRGPCKPMPTVGPRQWLFPERKPAPAPSSGDWAMEFLAAKIFDRPVRSNL |
| | KDTPYYPYVKNQYNVYFDLKFE (SEQ ID NO: 19) |
| ORF2t/3 | MSFWKPPVHNVTGIQRMWPKKASGRHPKTRNPRRKLTFTPKRIETVGDRGR |
| | KRDRSPLAREPRGPLPTAVAAAVPRAAQAQTGNQSPLRAAHKDPTRGPCKP |
| | MPTVGPRQWLFPERKPAPAPSSGDWAMEFLAAKIFDRPVRSNLKDTPYYPY |
| | VKNQYNVYFDLKFE (SEQ ID NO: 20) |
| ORF1 | MAWGWWKRRRRWWFRKRWTRGRLRRRWPRSARRRPRRRRVRRRRRWR |
| | RGRRKTRTYRRRRRFRRRGRKAKLIIKLWQPAVIKRCRIKGYIPLIISGNGTF |
| | ATNFTSHINDRIMKGPFGGGHSTMRFSLYILFEEHLRHMNFWTRSNDNLELT |
| | RYLGASVKIYRHPDQDFIVIYNRRTPLGGNIYTAPSLHPGNAILAKHKILVPS |
| | LQTRPKGRKAIRLRIAPPTLFTDKWYFQKDIADLTLFNIMAVEADLRFPFCSP |
| | QTDNTCISFQVLSSVYNNYLSINTFNNDNSDSKLKEFLNKAFPTTGTKGTSLN |
| | ALNTFRTEGCISHPQLKKPNPQINKPLESQYFAPLDALWGDPIYYNDLNENK |
| | SLNDIIEKILIKNMITYHAKLREFPNSYQGNKAFCHLTGIYSPPYLNQGRISPEI |
| | FGLYTEIIYNPYTDKGTGNKVWMDPLTKENNIYKEGQSKCLLTDMPLWTLL |
| | FGYTDWCKKDTNNWDLPLNYRLVLICPYTFPKLYNEKVKDYGYIPYSYKFG |
| | AGQMPDGSNYIPFQFRAKWYPTVLHQQQVMEDISRSGPFAPKVEKPSTQLV |
| | MKYCFNFNWGGNPIIEQIVKDPSFQPTYEIPGTGNIPRRIQVIDPRVLGPHYSF |
| | RSWDMRRHTFSRASIKRVSEQQETSDLVFSGPKKPRVDIPKQETQEESSHSL |
| | QRESRPWETEEESETEALSQESQEVPFQQQLQQQYQEQLKLRQGIKVLFEQL |
| | IRTQQGVHVNPCLR (SEQ ID NO: 21) |
| ORF1/1 | MAWGWWKRRRRWWFRKRWTRGRLRRRWPRSARRRPRRRRIVKDPSFQPT |
| | YEIPGTGNIPRRIQVIDPRVLGPHYSFRSWDMRRHTFSRASIKRVSEQQETSD |
| | LVFSGPKKPRVDIPKQETQEESSHSLQRESRPWETEEESETEALSQESQEVPF |
| | QQQLQQQYQEQLKLRQGIKVLFEQLIRTQQGVHVNPCLR (SEQ ID NO: 22) |
| ORF1/2 | MAWGWWKRRRRWWFRKRWTRGRLRRRWPRSARRRPRRRRAQKSLGSTS |
| | QNKKPKKKAHIHSKENRDRGRPRKKARQKPSRKRAKRSPSNSSCSSSTKSSS |
| | SSDRESKSSSSSS (SEQ ID NO: 23) |

TABLE N10
Exemplary Anellovirus nucleic acid
sequence (Alphatorquevirus, Clade 4)

| | |
|---|---|
| Name | TTV-HD20a |
| Genus/Clade | Alphatorquevirus, Clade 4 |
| Accession Number | FR751492.1 |
| Full Sequence: 3878 bp | |

(SEQ ID NO: 24)
Annotations:

| Putative Domain | Base range |
|---|---|
| TATA Box | 82-87 |
| Initiator Element | 95-115 |
| Transcriptional Start Site | 115 |
| 5′ UTR Conserved Domain | 170-238 |
| ORF2 | 335-721 |
| ORF2/2 | 335-717; 2446-2902 |
| ORF2/3 | 335-717; 2675-3109 |
| ORF1 | 586-2928 |
| ORF1/1 | 586-717; 2446-2928 |
| ORF1/2 | 586-717; 2675-2902 |
| Three open-reading frame region | 2640-2899 |
| Poly(A) Signal | 3106-3114 |
| GC-rich region | 3768-3878 |

TABLE A10
Exemplary Anellovirus amino acid sequences (Alphatorquevirus, Clade 4)
TTV-HD20a (Alphatorquevirus Clade 4)

| | |
|---|---|
| ORF2 | MSRCWCPPRGDVSSRESRWYEAVRGSHDAFCGCSDPILHLSRLAARFNHQG |
| | PPTPPTDDRAPQNTPVRRLLPLPSYPGEGPQARWPGGDGGAAGGDRREGGD |
| | GGARAAEDEYQPEDLDELFGAIEQEQ (SEQ ID NO: 25) |
| ORF2/2 | MSRCWCPPRGDVSSRESRWYEAVRGSHDAFCGCSDPILHLSRLAARFNHQG |
| | PPTPPTDDRAPQNTPVRRLLPLPSYPGEGPQARWPGGDGGAAGGDRREGGD |
| | GGARAAEDEYQPEDLDELFGAIEQEQSSETRAKTTKYPVPVDSLGIYKSLTR |
| | NASRRRGSSTASTSEEASLLKQLSGACSRNHYLASMLLAPSGHPSSFYPQNT |
| | SEKTALQKAPQVHRPKDPVSGQKRVRRRRSPRRRTRRRRRGSSSSESSESSE |
| | HSSSNSSTSRSNSPRPRRIST (SEQ ID NO: 26) |
| ORF2/3 | MSRCWCPPRGDVSSRESRWYEAVRGSHDAFCGCSDPILHLSRLAARFNHQG |
| | PPTPPTDDRAPQNTPVRRLLPLPSYPGEGPQARWPGGDGGAAGGDRREGGD |
| | GGARAAEDEYQPEDLDELFGAIEQEQIPARRRRCRKRLRFTGQKTPYLVRRE |
| | SDGDDLLGGEPGGDDEGAPPAKAPRAASTPVPTPALRGPTRQDPGESPRKPP |
| | VIFPAMNKVFLFPPEGPKPILGKEAWQDEYETCRVWNRPARTHHTDTPFYP |
| | WAPHKFHVSFKLGFQ (SEQ ID NO: 27) |
| ORF1 | MAWWGWRRRWWRPKRRWRWRRARRRRRVPARRPRRAFRRYRTRTVRR |
| | RRRGRRRGYRRRYRLRRYARRRFRRKKIVLTQWNPQTTRKCIIRGMMPVL |
| | WAGMGTGGRNYAVRSDDYVVNKGFGGSFATETFSLKVLYDQFQRGFNRW |
| | SHTNEDLDLARYRGCRWTFYRHKDTDFIVYFTNNPPMKTNQFSAPLTTPGM |
| | LMRSKYKVLIPSFQTRPKGRKTVTVKIRPPKLFQDKWYTQQDLCSVPLVQL |
| | NVTAADFTHPFGSPLTETPCVEFQVLGDLYNTCLNIDLPQFSELGEITSAYSK |
| | PNSNNLKELYKELFTKATSGHYWQTFITNSMVRAHIDADKAKEAQRASTTP |
| | SYNNDPFPTIPVKSEFAQWKKKFTDTRDSPFLFATYHPEAIKDTIMKMRENN |
| | FKLETGPNDKYGDYTAQYQGNTHMLDYYLGFYSPIFLSDGRSNVEFFTAYR |
| | DIVYNPFLDKAQGNMVWFQYHTKTDNKFKKPECHWEIKDMPLWALLNGY |
| | VDYLETQIQYGDLSKEGKVLIRCPYTKPALVDPRDDTAGYVVYNRNFGRGK |
| | WIDGGGYIPLHERTKWYVMLRYQTDVFHDIVTCGPWQYRDDNKNSQLVA |
| | KYRFSFIWGGNTVHSQVIRNPCKDNQVSGPRRQPRDIQVVDPQRITPPWVLH |
| | SFDQRRGLFTETALRRLLQEPLPGEYAVSTLRTPLLFLPSEYQREDGAAESAS |
| | GSPAKRPRIWSEESQTETISSEENPAETTRELLQRKLREQRALQFQLQHFAVQ |
| | LAKTQANLHVNPLLSFPQ (SEQ ID NO: 28) |
| ORF1/1 | MAWWGWRRRWWRPKRRWRWRRARRRRRVPARRPRRAFRRYRTRTVIRN |
| | PCKDNQVSGPRRQPRDIQVVDPQRITPPWVLHSFDQRRGLFTETALRRLLQE |
| | PLPGEYAVSTLRTPLLFLPSEYQREDGAAESASGSPAKRPRIWSEESQTETISS |
| | EENPAETTRELLQRKLREQRALQFQLQHFAVQLAKTQANLHVNPLLSFPQ |
| | (SEQ ID NO: 29) |
| ORF1/2 | MAWWGWRRRWWRPKRRWRWRRARRRRRVPARRPRRAFRRYRTRTNTSE |
| | KTALQKAPQVHRPKDPVSGQKRVRRRRSPRRRTRRRRRGSSSSESSESSEHS |
| | SSNSSTSRSNSPRPRRIST (SEQ ID NO: 30) |

TABLE N11
Exemplary Anellovirus nucleic acid
sequence (Alphatorquevirus, Clade 5)

| | |
|---|---|
| Name | TTV-16 (TUS01) |
| Genus/Clade | Alphatorquevirus, Clade 5 |
| Accession Number | AB017613.1 |
| Full Sequence: 3818 bp | |

(SEQ ID NO: 31)
Annotations:

| Putative Domain | Base range |
|---|---|
| TATA Box | 82-86 |
| Initiator Element | 100-115 |
| Transcriptional Start Site | 115 |
| 5′ UTR Conserved Domain | 170-240 |
| ORF2 | 331-726 |
| ORF2/2 | 331-722; 2412-2847 |
| ORF2/3 | 331-722; 2638-3058 |
| ORF2t/3 | 331-380; 2638-3058 |
| ORF1 | 588-2873 |
| ORF1/1 | 588-722; 2412-2873 |
| ORF1/2 | 588-722; 2638-2847 |
| Three open-reading frame region | 2699-2969 |
| Poly(A) Signal | 3220-3225 |
| GC-rich region | 3302-3541 |

TABLE A11
Exemplary Anellovirus amino acid sequences (Alphatorquevirus, Clade 5)
TTV-16-TUS01 (Alphatorquevirus Clade 5)

| | |
|---|---|
| ORF2 | MSFTTPTINAGIREQQWFESTLRSHHSFCGCGDPVLHFTNLATRFNYLPATSS |
| | PLDPPGPAPRGRPALRRLPALPSAPATPSRELAWPTGSEGGAGGRGAGGEGG |
| | AAVEGDYREEELDELFAALEEDANQG (SEQ ID NO: 32) |
| ORF2/2 | MSFTTPTINAGIREQQWFESTLRSHHSFCGCGDPVLHFTNLATRFNYLPATSS |
| | PLDPPGPAPRGRPALRRLPALPSAPATPSRELAWPTGSEGGAGGRGAGGEGG |
| | AAVEGDYREEELDELFAALEEDANQGSLKTPVETPESFPVPVDSLEKYKSLA |
| | RFPWDRPTSSTTSTPDAGSLVKKLLKECNNNKNLMNLLHSNLRDPNFLQQP |
| | QKSSSSKKTRLQGKENRHYSKKRKKSKSSKRRQYSSSSSETSRSSSQSSSSSN |
| | SSCSNSSKPNPICI (SEQ ID NO: 33) |
| ORF2/3 | MSFTTPTINAGIREQQWFESTLRSHHSFCGCGDPVLHFTNLATRENYLPATSS |
| | PLDPPGPAPRGRPALRRLPALPSAPATPSRELAWPTGSEGGAGGRGAGGEGG |
| | AAVEGDYREEELDELFAALEEDANQGSRRNPPARRRLDFRGRKIATTARRE |
| | RSRSPPNADSTAPAPAKHPGAARNQAAAPIPLAPTPQNPIQFAFKPTIFKPFIK |
| | YDMFGDPLPHPPTAEEWETEYQCCKAFNRPPRTNLKDTPFYPWVPKPKPQF |
| | RVSFKLGFQ (SEQ ID NO: 34) |
| ORF2t/3 | MSFTTPTINAGIREQQCSRRNPPARRRLDFRGRKIATTARRERSRSPPNADST |
| | APAPAKHPGAARNQAAAPIPLAPTPQNPIQFAFKPTIFKPFIKYDMFGDPLPH |
| | PPTAEEWETEYQCCKAFNRPPRTNLKDTPFYPWVPKPKPQFRVSFKLGFQ |
| | (SEQ ID NO: 35) |
| ORF1 | MAYWFRRWGWRPRRRWRRWRRRRRRLPRRRTRRAVRGLGRRRKPRVRR |
| | RRRTRRRTYRRGWRRRRYIRRGRRKKKLILTQWNPAIVKRCNIKGGLPIIICG |
| | EPRAAFNYGYHMEDYTPQPFPFGGGMSTVTFSLKALYDQYLKHQNRWTFS |
| | NDQLDLARYRGCKLRFYRSPVCDFIVHYNLIPPLKMNQFTSPNTHPGLLMLS |
| | KHKIIIPSFQTRPGGRRFVKIRLNPPKLFEDKWYTQQDLCKVPLVSITATAAD |
| | LRYPFCSPQTNNPCTTFQVLRKNYNTVIGTSVKDQESTQDFENWLYKTDSH |
| | YQTFATEAQLGRIPAFNPDGTKNTKQQSWQDNWSKKNSPWTGNSGTYPQT |
| | TSEMYKIPYDSNFGFPTYRAQKDYILERRQCNFNYEVNNPVSKKVWPQPST |
| | TTPTVDYYEYHCGWFSNIFIGPNRYNLQFQTAYVDTTYNPLMDKGKGNKIW |
| | FQYLSKKGTDYNEKQCYCTLEDMPLWAICFGYTDYVETQLGPNVDHETAG |
| | LIIMICPYTQPPMYDKNRPNWGYVVYDTNFGNGKMPSGSGQVPVYWQCR |
| | WRPMLWFQQQVLNDISKTGPYAYRDEYKNVQLTLYYNFIFNWGGDMYYP |
| | QVVKNPCGDSGIVPGSGRFTREVQVVSPLSMGPAYIFHYFDSRRGFFSEKAL |
| | KRMQQQQEFDESFTFKPKRPKLSTAAAEILQLEEDSTSGEGKSPLQQEEKEV |
| | EVLQTPTVQLQLQRNIQEQLAIKQQLQFLLLQLLKTQSNLHLNPQFLSPS |
| | (SEQ ID NO: 36) |
| ORF1/1 | MAYWFRRWGWRPRRRWRRWRRRRRRLPRRRTRRAVRGLGRRRKPRVVK |
| | NPCGDSGIVPGSGRFTREVQVVSPLSMGPAYIFHYFDSRRGFFSEKALKRMQ |
| | QQQEFDESFTFKPKRPKLSTAAAEILQLEEDSTSGEGKSPLQQEEKEVEVLQT |
| | PTVQLQLQRNIQEQLAIKQQLQFLLLQLLKTQSNLHLNPQFLSPS (SEQ ID |
| | NO: 37) |
| ORF1/2 | MAYWFRRWGWRPRRRWRRWRRRRRRLPRRRTRRAVRGLGRRRKPRQPQ |
| | KSSSSKKTRLQGKENRHYSKKRKKSKSSKRRQYSSSSSETSRSSSQSSSSSNS |
| | SCSNSSKPNPICI (SEQ ID NO: 38) |

TABLE N12
Exemplary Anellovirus nucleic acid
sequence (Alphatorquevirus, Clade 6)

| | |
|---|---|
| Name | TTV-TJN02 |
| Genus/Clade | Alphatorquevirus, Clade 6 |
| Accession Number | AB028669.1 |
| Full Sequence: 3794 bp | |

(SEQ ID NO: 39)
Annotations:

| Putative Domain | Base range |
|---|---|
| TATA Box | 89-90 |
| Cap Site | 107-114 |
| Transcriptional Start Site | 114 |
| 5′ UTR Conserved Domain | 174-244 |
| ORF2 | 357-731 |
| ORF2/2 | 357-727; 2381-2813 |
| ORF2/3 | 357-727; 2619-3021 |
| ORF2t/3 | 357-406; 2619-3021 |
| ORF1 | 599-2839 |
| ORF1/1 | 599-727; 2381-2839 |
| ORF1/2 | 599-727; 2619-2813 |
| Three open-reading frame region | 2596-2810 |
| Poly(A) Signal | 3017-3022 |
| GC-rich region | 3691-3794 |

TABLE A12
Exemplary Anellovirus amino acid sequences (Alphatorquevirus, Clade 6)
TTV-TJN02 (Alphatorquevirus Clade 6)

| | |
|---|---|
| ORF2 | MSWRPPVHDAPGIERNWYEACFRAHAGACGCGNFIMHLNLLAGRYGFTPG |
| | SAPPGGPPPGTPQIRRARPSPAAPEQPAALPWHGDGGDGGAAGPPDAGGDA |
| | VAGAPYGEQELADLLDAIEDDEQ (SEQ ID NO: 40) |
| ORF2/2 | MSWRPPVHDAPGIERNWYEACFRAHAGACGCGNFIMHLNLLAGRYGFTPG |
| | SAPPGGPPPGTPQIRRARPSPAAPEQPAALPWHGDGGDGGAAGPPDAGGDA |
| | VAGAPYGEQELADLLDAIEDDEQRSKTRARRTDNPPTPVDTLEEYKWRTRN |
| | KWDPAGCSTPLTGEGAILARKLSNACKKNLLTMTNILHNQKDLESFLQQNQ |
| | QRESSESPKKARIQRKKGRKPLPKSRRRRRQYSSSSDDSESNSSSSSSSNSSPE |
| | KCSKRKRVST (SEQ ID NO: 41) |
| ORF2/3 | MSWRPPVHDAPGIERNWYEACFRAHAGACGCGNFIMHLNLLAGRYGFTPG |
| | SAPPGGPPPGTPQIRRARPSPAAPEQPAALPWHGDGGDGGAAGPPDAGGDA |
| | VAGAPYGEQELADLLDAIEDDEHRGRVPRARKRLVFRGRKVASLCRRADA |
| | GGDSTPPQATTQRATAAPAAAPIPHPRNVQNASGSPPKPYVIKPAINQVYLFP |
| | ERAPKPPPSSQDWQQEYEACAAWDRPPRYNLSSPPFYPSCPSKFCVKFSLGF |
| | K (SEQ ID NO: 42) |
| ORF2t/3 | MSWRPPVHDAPGIERNCRGRVPRARKRLVFRGRKVASLCRRADAGGDSTPP |
| | QATTQRATAAPAAAPIPHPRNVQNASGSPPKPYVIKPAINQVYLFPERAPKPP |
| | PSSQDWQQEYEACAAWDRPPRYNLSSPPFYPSCPSKFCVKFSLGFK (SEQ ID |
| | NO: 43) |
| ORF1 | MAWGWWRWRRRWPARRWRRRRRRRPVRRTRARRPARRYRRRRTVRTRR |
| | RRWGRRRYRRGWRRRTYVRKGRHRKKKKRLILRQWQPATRRRCTITGYLP |
| | IVFCGHTRGNKNYALHSDDYTPQGQPFGGALSTTSFSLKVLFDQHQRGLNK |
| | WSFPNDQLDLARYRGCKFIFYRTKQTDWVGQYDISEPYKLDKYSCPNYHPG |
| | NMIKAKHKFLIPSYDTNPRGRQKIIVKIPPPDLFVDKWYTQEDLCSVNLVSLA |
| | VSAASFLHPFGSPQTDNPCYTFQVLKEFYYQAIGFSASTQAMTSVLDTLYTQ |
| | NSYWESNLTQFYVLNAKKGSDTTQPLTSNMPTREEFMAKKNTNYNWYTY |
| | KAASVKNKLHQMRQTYFEELTSKGPQTTKSEEGYSQHWTTPSTNAYEYHL |
| | GMFSAIFLAPDRPVPRFPCAYQDVTYNPLMDKGVGNHIWFQYNTKADTQLI |
| | VTGGSCKAHIQDIPLWAAFYGYSDFIESELGPFVDAETVGLVCVICPYTKPP |
| | MYNKTNPAMGYVFYDRNFGDGKWTDGRGKIEPYWQVRWRPEMLFQETV |
| | MADLVQTGPFSYKDELKNSTLVCKYKFYFTWGGNMMFQQTIKNPCKTDGQ |
| | PTDSSRHPRGIQVADPEQMGPRWVFHSFDWRRGYLSEKALKRLQEKPLDYD |
| | EYFTQPKRPRIFPPTESAEGEFREPEKGSYSEEERSQASAEEQTQEATVLLLK |
| | RRLREQQQLQQQLQFLTREMFKTQAGLHLNPMLLNQR (SEQ ID NO: 44) |
| ORF1/1 | MAWGWWRWRRRWPARRWRRRRRRRPVRRTRARRPARRYRRRRTTIKNP |
| | CKTDGQPTDSSRHPRGIQVADPEQMGPRWVFHSFDWRRGYLSEKALKRLQ |
| | EKPLDYDEYFTQPKRPRIFPPTESAEGEFREPEKGSYSEEERSQASAEEQTQE |
| | ATVLLLKRRLREQQQLQQQLQFLTREMFKTQAGLHLNPMLLNQR (SEQ ID |
| | NO: 45) |
| ORF1/2 | MAWGWWRWRRRWPARRWRRRRRRRPVRRTRARRPARRYRRRRTQRESS |
| | ESPKKARIQRKKGRKPLPKSRRRRRQYSSSSDDSESNSSSSSSSNSSPEKCSKR |
| | KRVST (SEQ ID NO: 46) |

TABLE N13
Exemplary Anellovirus nucleic acid
sequence (Alphatorquevirus, Clade 7)

| | |
|---|---|
| Name | TTV-HD16d |
| Genus/Clade | Alphatorquevirus, Clade 7 |
| Accession Number | FR751479.1 |
| Full Sequence: 3866 bp | |

(SEQ ID NO: 47)
Annotations:

| Putative Domain | Base range |
|---|---|
| TATA Box | 82-86 |
| Initiator Element | 94-115 |
| Transcriptional Start Site | 115 |
| 5′ UTR Conserved Domain | 170-240 |
| ORF2 | 357-728 |
| ORF2/2 | 357-724; 2411-2870 |
| ORF2/3 | 357-724; 2646-3081 |
| ORF1 | 599-2896 |
| ORF1/1 | 599-724; 2411-2896 |
| ORF1/2 | 599-724; 2646-2870 |
| Three open-reading frame region | 2629-2867 |
| Poly(A) Signal | 3076-3086 |
| GC-rich region | 3759-3866 |

TABLE A13
Exemplary Anellovirus amino acid sequences (Alphatorquevirus, Clade 7)
TTV-HD16d (Alphatorquevirus Clade 7)

| | |
|---|---|
| ORF2 | MSWSRPVHNAAGIERQWFESTFRSHASCCGCGNFVNHINVLAARYGFTGGP |
| | TPPGGPGPRPQLRPALPAPDPDPQAPNREPWRGAGGGNDGEGAAGNPGGA |
| | AGDVYDGEDLDALFAAVVEDVE (SEQ ID NO: 48) |
| ORF2/2 | MSWSRPVHNAAGIERQWFESTFRSHASCCGCGNFVNHINVLAARYGFTGGP |
| | TPPGGPGPRPQLRPALPAPDPDPQAPNREPWRGAGGGNDGEGAAGNPGGA |
| | AGDVYDGEDLDALFAAVVEDVESSRTPAKTVDWNPPTPVDSVATYKLLTH |
| | TPWAPNSRSTTGTTDMAFLAKTLSTECLNNQKMMQTILTHTKGLDIFHPQT |
| | KPPKSKKKTSVSSKQHRRTQKRAIKKSSKKRKYSDSSQSSTSNSTCSSQSGSE |
| | SESNSDTYSNRCSKLRPIST (SEQ ID NO: 49) |
| ORF2/3 | MSWSRPVHNAAGIERQWFESTFRSHASCCGCGNFVNHINVLAARYGFTGGP |
| | TPPGGPGPRPQLRPALPAPDPDPQAPNREPWRGAGGGNDGEGAAGNPGGA |
| | AGDVYDGEDLDALFAAVVEDVEPSRPRARKRLQFPQNSTVELRRERSRSPP |
| | RNASTPIPARAAQATPPAARRAAANRRATPIPTPTDVQNSGQSPPKPIYIYPA |
| | VKQVFMFDPPGPKAISGAKAWEDEFLTAKVWNRPVRKYYSDTPYYPWAPK |
| | PQYSVSFKLGWK (SEQ ID NO: 50) |
| ORF1 | MAWSWWWQRWRRRRWKPRRRRWRRLRWRRPRRAVRRRRRGRRVRRRR |
| | WARRRGRRRRYATRRKRRYRGRRFKKKLVLTQWHPNTMRRCLIKGIVPLV |
| | ICGHTRWNYNYALHSKDYTEEGRYPHGGALSTTTWSLKVLYDEHLKHHDF |
| | WGYPNNQLDLARYKGAKFTFYRHKKTDFIIFFNRKPPFKLNKYSCASYHPG |
| | MLMQQRHKILLPSYETKPKGRPKITVRIKPPTLLEDKWYTQQDLCDVNLLQ |
| | LVVTAADFRHPLCSPQTNTPTTTFQVLKDIYYDTMSISEPTDSYTSVNNKSTT |
| | QTFTNYSNTLENILYTRASYWNSFHATEYLNPNIIYKNGEKLFKEHEDLITW |
| | MTQTNNTGFLTKNNTAFGNNSYRPNADKIKKARKTYWNALIGTNDLATNI |
| | GQARAERFEYHLGWYSPIFLSRHRSNMNFARAYQDVTYNPNCDRGVNNRV |
| | WVQPLTKPTTEFDEKRCKCVVQHLPLWAALYCYQDFVEEELGSSSEILNSC |
| | LLVLQCPYTFPPMYDKKLPDKGFVFYDSLFGDGKMSDGRGQVDIFWQQRW |
| | YPRLATQMQVMHDITMTGPFSYRDELVSTQLTAKYTFDFMWGGNMISTQII |
| | KNPCKDSGLEPAYPGRQRRDLQIVDPYSMGPQFSFHNWDYRHGLFGQDAID |
| | RVSKQPKDDADYPNPYKRPRYFPPTDQAAQEQEKDFSFLKTAPSNSEESDQE |
| | VLQETQVLRFQPEQHKQLHLQLAERQRIGEQLRYLLQQMFKTQANLHLNPY |
| | TFTQL (SEQ ID NO: 51) |
| ORF1/1 | MAWSWWWQRWRRRRWKPRRRRWRRLRWRRPRRAVRRRRRGRRIIKNPC |
| | KDSGLEPAYPGRQRRDLQIVDPYSMGPQFSFHNWDYRHGLFGQDAIDRVSK |
| | QPKDDADYPNPYKRPRYFPPTDQAAQEQEKDFSFLKTAPSNSEESDQEVLQE |
| | TQVLRFQPEQHKQLHLQLAERQRIGEQLRYLLQQMFKTQANLHLNPYTFTQ |
| | L (SEQ ID NO: 52) |
| ORF1/2 | MAWSWWWQRWRRRRWKPRRRRWRRLRWRRPRRAVRRRRRGRRTKPPK |
| | SKKKTSVSSKQHRRTQKRAIKKSSKKRKYSDSSQSSTSNSTCSSQSGSESESN |
| | SDTYSNRCSKLRPIST (SEQ ID NO: 53) |

TABLE N14
Exemplary Anellovirus nucleic acid sequence (Betatorquevirus)

| | |
|---|---|
| Name | Ring2 |
| Genus/Clade | Betatorquevirus |
| Accession Number | JX134045.1 |
| Full Sequence: 2979 bp | |

(SEQ ID NO: 54)
Annotations:

| Putative Domain | Base range |
|---|---|
| TATA Box | 237-243 |
| Cap Site | 260-267 |
| Transcriptional Start Site | 267 |
| 5′ UTR Conserved Domain | 323-393 |
| ORF2 | 424-723 |
| ORF2/2 | 424-719; 2274-2589 |
| ORF2/3 | 424-719; 2449-2812 |
| ORF1 | 612-2612 |
| ORF1/1 | 612-719; 2274-2612 |
| ORF1/2 | 612-719; 2449-2589 |
| Three open-reading frame region | 2441-2586 |
| Poly(A) Signal | 2808-2813 |
| GC-rich region | 2868-2929 |

TABLE N14.1
Exemplary Anellovirus nucleic acid sequence (Betatorquevirus)

| | |
|---|---|
| Name | Ring2 |
| Genus/Clade | Betatorquevirus |
| Full Sequence: 2979 bp | |

(SEQ ID NO: 2506)
Annotations:

| Putative Domain | Base range |
|---|---|
| 5′ non-coding region (NCR) | 1-425 |
| TATA Box | 239-245 |
| Cap Site | 262-269 |
| 5′ UTR Conserved Domain | 326-395 |
| ORF3 | 426-2814 |
| ORF2/2 | 426-2591 |
| ORF2 | 426-725 |
| ORF1 | 614-2614 |
| ORF1/1 | 614-2614 |
| ORF1/2 | 614-2591 |
| 3′ non-coding region (NCR) | 2815-2979 |
| Poly(A) Signal | 2810-2815 |
| GC-rich region | 2870-2979 |

TABLE A14
Exemplary Anellovirus amino acid sequences (Betatorquevirus)
Ring2 (Betatorquevirus)

| | |
|---|---|
| ORF2 | MSDCFKPTCYNNKTKQTHWINNLHLTHDLICFCPTPTRHLLLALAEQQETIE |
| | VSKQEKEKITRCLITTEEDGTTTDVLDGMDEVGLDALFAEDFEEKEG (SEQ |
| | ID NO: 55) |
| ORF2/2 | MSDCFKPTCYNNKTKQTHWINNLHLTHDLICFCPTPTRHLLLALAEQQETIE |
| | VSKQEKEKITRCLITTEEDGTTTDVLDGMDEVGLDALFAEDFEEKEGFNIPY |
| | PVTSMKQLRYRVQGKPQNPSYTPSTIDTGTTQQQLCHELAKTGHLKTLFLK |
| | LQSQIDSNCSNKPSNACKSRKKRRRKKKKKYSSSSATSDSSSSCTESE (SEQ |
| | ID NO: 56) |
| ORF2/3 | MSDCFKPTCYNNKTKQTHWINNLHLTHDLICFCPTPTRHLLLALAEQQETIE |
| | VSKQEKEKITRCLITTEEDGTTTDVLDGMDEVGLDALFAEDFEEKEGARSTA |
| | TAQTSPRMPANLGRNAGEKRKRSTAAHQQPQTAAAAVQRANNIIIKGPITFN |
| | CVKKVKLFDDKPKNRRFTPEEFETELQIAKWLKRPPRSFVNDPPFYPWLPPE |
| | PVVNFKLNFTE (SEQ ID NO: 57) |
| ORF1 | MPYYYRRRRYNYRRPRWYGRGWIRRPFRRRFRRKRRVRPTYTTIPLKQWQ |
| | PPYKRTCYIKGQDCLIYYSNLRLGMNSTMYEKSIVPVHWPGGGSFSVSMLT |
| | LDALYDIHKLCRNWWTSTNQDLPLVRYKGCKITFYQSTFTDYIVRIHTELPA |
| | NSNKLTYPNTHPLMMMMSKYKHIIPSRQTRRKKKPYTKIFVKPPPQFENKW |
| | YFATDLYKIPLLQIHCTACNLQNPFVKPDKLSNNVTLWSLNTISIQNRNMSV |
| | DQGQSWPFKILGTQSFYFYFYTGANLPGDTTQIPVADLLPLTNPRINRPGQSL |
| | NEAKITDHITFTEYKNKFTNYWGNPFNKHIQEHLDMILYSLKSPEAIKNEWT |
| | TENMKWNQLNNAGTMALTPFNEPIFTQIQYNPDRDTGEDTQLYLLSNATGT |
| | GWDPPGIPELILEGFPLWLIYWGFADFQKNLKKVTNIDTNYMLVAKTKFTQ |
| | KPGTFYLVILNDTFVEGNSPYEKQPLPEDNIKWYPQVQYQLEAQNKLLQTG |
| | PFTPNIQGQLSDNISMFYKFYFKWGGSPPKAINVENPAHQIQYPIPRNEHETT |
| | SLQSPGEAPESILYSFDYRHGNYTTTALSRISQDWALKDTVSKITEPDRQQLL |
| | KQALECLQISEETQEKKEKEVQQLISNLRQQQQLYRERIISLLKDQ (SEQ ID |
| | NO: 58) |
| ORF1/1 | MPYYYRRRRYNYRRPRWYGRGWIRRPFRRRFRRKRRIQYPIPRNEHETTSL |
| | QSPGEAPESILYSFDYRHGNYTTTALSRISQDWALKDTVSKITEPDRQQLLK |
| | QALECLQISEETQEKKEKEVQQLISNLRQQQQLYRERIISLLKDQ (SEQ ID |
| | NO: 59) |
| ORF1/2 | MPYYYRRRRYNYRRPRWYGRGWIRRPFRRRFRRKRRSQIDSNCSNKPSNAC |
| | KSRKKRRRKKKKKYSSSSATSDSSSSCTESE (SEQ ID NO: 60) |

TABLE N15
Exemplary Anellovirus nucleic acid sequence (Gammatorquevirus)

| | |
|---|---|
| Name | TTMDV-MD1-073 |
| Genus/Clade | Gammatorquevirus |
| Accession Number | AB290918.1 |
| Full Sequence: 3242 bp | |

(SEQ ID NO: 61)
Annotations:

| Putative Domain | Base range |
|---|---|
| TATA Box | 21-25 |
| Cap Site | 42-49 |
| Transcriptional Start Site | 49 |
| 5′ UTR Conserved Domain | 117-187 |
| ORF2 | 283-588 |
| ORF2/2 | 283-584; 1977-2388 |
| ORF2/3 | 283-584; 2197-2614 |
| ORF1 | 432-2453 |
| ORF1/1 | 432-584; 1977-2453 |
| ORF1/2 | 432-584; 2197-2388 |
| Three open-reading frame region | 2186-2385 |
| Poly(A) Signal | 2676-2681 |
| GC-rich region | 3054-3172 |

TABLE A15
Exemplary Anellovirus amino acid sequences (Gammatorquevirus)
TTMDV-MD1-073 (Gammatorquevirus)

| | |
|---|---|
| ORF2 | MWMSGIADSHDSWCDCDTPFAHLLASIFPPGHTDRTRTIQEILTRDFRKTCL |
| | SGGADATNSGMAETIEEKREDFQKEEKEDFTEEQNIEDLLAAVADAEGR |
| | (SEQ ID NO: 62) |
| ORF2/2 | MWMSGIADSHDSWCDCDTPFAHLLASIFPPGHTDRTRTIQEILTRDFRKTCL |
| | SGGADATNSGMAETIEEKREDFQKEEKEDFTEEQNIEDLLAAVADAEGRYQ |
| | TNQLKTQETKTNMMCPIQSKKHYKLLTQQKTLLPRCSMTGTTDGVALHQQ |
| | LLKECNKTSQLIHLSNLIQTQNQHPRKKDYYQSSTTHKRKRKRSTNVSSLSA |
| | KKVHARSRKRRKTSSSSSSSSSSSSRNSSTTS (SEQ ID NO: 63) |
| ORF2/3 | MWMSGIADSHDSWCDCDTPFAHLLASIFPPGHTDRTRTIQEILTRDFRKTCL |
| | SGGADATNSGMAETIEEKREDFQKEEKEDFTEEQNIEDLLAAVADAEGRTST |
| | QEKKTTTSPPRPTKENGKDQPMSPLSLRRKYMPGAGNGGKHPQAHPAAAA |
| | AAAETQAQPLSTNQGLKSETKIITTTNGGTRITLTRFKPGFEQETEKELAQAF |
| | NRPPRLFKEDKPFYPWLPRFTPLVNFHLNFKG (SEQ ID NO: 64) |
| ORF1 | MPFWWGRRNKFWYGRNYRRKKRRFPKRRKRRFYRRTKYRRPARRRRRRR |
| | RKVRRKKKTLIVRQWQPDSIVLCKIKGYDSIIWGAEGTQFQCSTHEMYEYTR |
| | QKYPGGGGFGVQLYSLEYLYDQWKLRNNIWTKTNQLKDLCRYLKCVMTF |
| | YRHQHIDFVIVYERQPPFEIDKLTYMKYHPYMLLQRKHKIILPSQTTNPRGKL |
| | KKKKTIKPPKQMLSKWFFQQQFAKYDLLLIAAAACSLRYPRIGCCNENRMIT |
| | LYCLNTKFYQDTEWGTTKQAPHYFKPYATINKSMIFVSNYGGKKTEYNIGQ |
| | WIETDIPGEGNLARYYRSISKEGGYFSPKILQAYQTKVKSVDYKPLPIVLGRY |
| | NPAIDDGKGNKIYLQTIMNGHWGLPQKTPDYIIEEVPLWLGFWGYYNYLKQ |
| | TRTEAIFPLHMFVVQSKYIQTQQTETPNNFWAFIDNSFIQGKNPWDSVITYSE |
| | QKLWFPTVAWQLKTINAICESGPYVPKLDNQTYSTWELATHYSFHFKWGGP |
| | QISDQPVEDPGNKNKYDVPDTIKEALQIVNPAKNIAATMFHDWDYRRGCITS |
| | TAIKRMQQNLPTDSSLESDSDSEPAPKKKRLLPVLHDPQKKTEKINQCLLSL |
| | CEESTCQEQETEENILKLIQQQQQQQQKLKHNLLVLIKDLKVKQRLLQLQTG |
| | VLE (SEQ ID NO: 65) |
| ORF1/1 | MPFWWGRRNKFWYGRNYRRKKRRFPKRRKRRFYRRTKYRRPARRRRRRR |
| | RKISDQPVEDPGNKNKYDVPDTIKEALQIVNPAKNIAATMFHDWDYRRGCI |
| | TSTAIKRMQQNLPTDSSLESDSDSEPAPKKKRLLPVLHDPQKKTEKINQCLLS |
| | LCEESTCQEQETEENILKLIQQQQQQQQKLKHNLLVLIKDLKVKQRLLQLQT |
| | GVLE (SEQ ID NO: 66) |
| ORF1/2 | MPFWWGRRNKFWYGRNYRRKKRRFPKRRKRRFYRRTKYRRPARRRRRRR |
| | RKISDQPVEDPGNKNKYDVPDTIKEALQIVNPAKNIAATMFHDWDYRRGCI |
| | TSTAIKRMQQNLPTDSSLESDSDSEPAPKKKRLLPVLHDPQKKTEKINQCLLS |
| | LCEESTCQEQETEENILKLIQQQQQQQQKLKHNLLVLIKDLKVKQRLLQLQT |
| | GVLE (SEQ ID NO: 67) |

TABLE N16
Exemplary Anellovirus nucleic acid sequence (Gammatorquevirus)

| | |
|---|---|
| Name | Ring3.1 |
| Genus/Clade | Gammatorquevirus |
| Accession Number | |
| Full Sequence: 3264 bp | |

(SEQ ID NO: 878)
Annotations:

| Putative Domain | Base range |
|---|---|
| TATA Box | 87-93 |
| Cap Site | 110-117 |
| Transcriptional Start Site | 117 |
| 5′ UTR Conserved Domain | 185-255 |
| ORF2 | 285-671 |
| ORF2/2 | 285-667; 2063-2498 |
| ORF2/3 | 285-667; 2295-2697 |
| TAIP | 385-585 |
| ORF1 | 512-2545 |
| ORF1/1 | 512-667; 2063-2545 |
| ORF1/2 | 512-667; 2295-2498 |
| Three open-reading frame region | 2295-2495 |
| Poly(A) Signal | 2729-2734 |
| GC-rich region | 3141-3264 |

TABLE A16
Exemplary Anellovirus amino acid sequences (Gammatorquevirus)
Ring 3.1 (Gammatorquevirus)

| | |
|---|---|
| ORF2 | MQTPASQISSDDFFVHTPFNAVTKQQIWMSQIADGHDNICHCHRPFAHLLAN |
| | IFPPGHKDRDLTINQ |
| | ILARDLTETCHSGGDEGTSGGGVAASATAATTNIKPEGDAEYPEDEIEDLLR |
| | HAGEEKERR (SEQ ID NO: 879) |
| ORF2/2 | MQTPASQISSDDFFVHTPFNAVTKQQIWMSQIADGHDNICHCHRPFAHLLAN |
| | IFPPGHKDRDLTINQ |
| | ILARDLTETCHSGGDEGTSGGGVAASATAATTNIKPEGDAEYPEDEIEDLLR |
| | HAGEEKERSGVVHKSQTQLLKTHAAETNILSPIQCNKQYKLKTLKSCTQQPS |
| | SMTGTLEGASLHKQLLKECQKTSKLIHLSNLMAQNHPKKRKDAPKKSQHK |
| | TKSKKRSKNVSSHSAKSLHAKKKQRTSSSSSSSSSSSSTSSEKTSSNSSLT |
| | (SEQ ID NO: 880) |
| ORF2/3 | MQTPASQISSDDFFVHTPFNAVTKQQIWMSQIADGHDNICHCHRPFAHLLAN |
| | IFPPGHKDRDLTINQ |
| | ILARDLTETCHSGGDEGTSGGGVAASATAATTNIKPEGDAEYPEDEIEDLLR |
| | HAGEEKERRITQKKEKMHQRNPNTKPKARRDPRMSPLTLRRAYMPRRNRG |
| | PPALHPAAAAAAVQAQKKPLQTPHSPEKRTENKSTTNGTFRVIPFKPGFEQE |
| | TEKELAIAFCRPPRKYKNDPPFYPWLPWTPLVHFNLNYKG (SEQ ID NO: |
| | 881) |
| TAIP | MDMTTFVTATVLLLTCLLIFFLLVIKTGILPLIKYLLEILQKHAILVETKEQAV |
| | VGSPLPLPPLQQI (SEQ ID NO: 882) |
| ORF1 | MPFWWRRRNKRWWGRRFRYRRYNKYKTRRRRRIPRRRNRRFTKTRRRRK |
| | RKKVRRKLKKITIKQWQPDSVKKCKIKGYSTLVMGAQGKQYNCYTNQASD |
| | YVQPKAPQGGGFGCEVFNLKWLYQEYTAHRNIWTKTNEYTDLCRYTGAQII |
| | LYRHPDVDFIVSWDNQPPFLLNKYTYPELQPQNLLLARRKRIILSQKSNPKG |
| | KLRIKLRIPPPKQMITKWFFQRDFCDVNLFKLCASAASFRYPGISHGAQSTIFS |
| | AYALNTDFYQCSDWCQTNTETGYLNIKTQQMPLWFHYREGGKEKWYKYT |
| | NKEHRPYTNTYLKSISYNDGLFSPKAMFAFEVKAGGEGTTEPPQGAQLIANL |
| | PLIALRYNPHEDTGHGNEIYLTSTFKGTYDKPKVTDALYFNNVPLWMGFYG |
| | YWDFILQETKNKGVFDQHMFVVKCPALRPISQVTKQVYYPLVDMDFCSGR |
| | LPFDEYLSKDIKSHWYPTAERQTVTINNFVTAGPYMPKFEPTDKDSTWQLN |
| | YHYKFFFKWGGPQVTDPTVEDPCSRNKYPVPDTMQQTIQIKNPEKLHPATL |
| | FHDWDLRRGFITQAAIKRMSENLQIDSSFESDGTESPKKKKRCTKEIPTQNQ |
| | KQEEIQECLLSLCEEPTCQEETEDLQLFIQQQQQQQYKLRKNLFKLLTHLKK |
| | GQRISQLQTGLLE (SEQ ID NO: 883) |
| ORF1/1 | MPFWWRRRNKRWWGRRFRYRRYNKYKTRRRRRIPRRRNRRFTKTRRRRK |
| | RKKWGGPQVTDPTVEDPCSRNKYPVPDTMQQTIQIKNPEKLHPATLFHDWD |
| | LRRGFITQAAIKRMSENLQIDSSFESDGTESPKKKKRCTKEIPTQNQKQEEIQE |
| | CLLSLCEEPTCQEETEDLQLFIQQQQQQQYKLRKNLFKLLTHLKKGQRISQL |
| | QTGLLE (SEQ ID NO: 884) |
| ORF1/2 | MPFWWRRRNKRWWGRRFRYRRYNKYKTRRRRRIPRRRNRRFTKTRRRRK |
| | RKKNHPKKRKDAPKKSQHKTKSKKRSKNVSSHSAKSLHAKKKQRTSSSSSS |
| | SSSSSSTSSEKTSSNSSLT (SEQ ID NO: 885) |

TABLE N17
Exemplary Anellovirus nucleic acid sequence (Gammatorquevirus)

| | |
|---|---|
| Name | Ring4 |
| Genus/Clade | Gammatorquevirus |
| Accession Number | |
| Full Sequence: 3176 bp | |

(SEQ ID NO: 886)
Annotations:

| Putative Domain | Base range |
|---|---|
| TATA Box | 87-93 |
| Cap Site | 110-117 |
| Transcriptional Start Site | 117 |
| 5′ UTR Conserved Domain | 185-254 |
| ORF2 | 286-660 |
| ORF2/2 | 286-656; 1998-2442 |
| ORF2/3 | 286-656; 2209-2641 |
| TAIP | 385-484 |
| ORF1 | 501-2489 |
| ORF1/1 | 501-656; 1998-2489 |
| ORF1/2 | 501-656; 2209-2442 |
| Three open-reading frame region | 2209-2439 |
| Poly(A) Signal | 2672-2678 |
| GC-rich region | 3076-3176 |

TABLE A17
Exemplary Anellovirus amino acid sequences (Gammatorquevirus)
Ring 4 (Gammatorquevirus)

| | |
|---|---|
| ORF2 | MVSISSSDFFKKTKFNEETQNQVWMSQIADSHDNICSCWHPFAHLLASIFPP |
| | GHKDRDLTINQILLRDYKEKCHSGGEEGENSGPTTGLITPKEEDIEKDGPEGA |
| | AEEDHTDALFAAAVENFER (SEQ ID NO: 887) |
| ORF2/2 | MVSISSSDFFKKTKFNEETQNQVWMSQIADSHDNICSCWHPFAHLLASIFPP |
| | GHKDRDLTINQILLRDYKEKCHSGGEEGENSGPTTGLITPKEEDIEKDGPEGA |
| | AEEDHTDALFAAAVENFESGVDHNSMNQKLLTLANKSSMMSPILSTKQYKL |
| | KIQKDKTPDLSSMIGTTDEALLKKDLLKECQLTSQLIQISKQLQRKTFPKRKR |
| | ELDPNSQSHNKKKRRHCHVSSLSAKKIPSKKQRHKKTSSSSSSSSRSSSSSSR |
| | ETSSSSSTN (SEQ ID NO: 888) |
| ORF2/3 | MVSISSSDFFKKTKFNEETQNQVWMSQIADSHDNICSCWHPFAHLLASIFPP |
| | GHKDRDLTINQILLRDYKEKCHSGGEEGENSGPTTGLITPKEEDIEKDGPEGA |
| | AEEDHTDALFAAAVENFERSASNFRGRHSQKEKENWTPTHSPTTKRRGDTV |
| | MSPLSLQKRYLPRNRDTRRPPAAHQAAAGAAAPPQEKHPPAHPQTKRESTN |
| | ASASHRHVTLTRFKPGFEEQTERELAIIFHRPPRTYKEDLPFYPWLPPAPLVQ |
| | FNLNFKG (SEQ ID NO: 889) |
| TAIP | MRRRRTKYGCLKLLTLMIISAVAGIHLLTFLLPYFLLATKIVILLLTKFF (SEQ |
| | ID NO: 890) |
| ORF1 | MPFWWRRRRKFWTNNRFNYTKRRRYRKRWPRRRRRRRPYRRPVRRRRRK |
| | LRKVKRKKKSLIVRQWQPDSIRTCKIIGQSAIVVGAEGKQMYCYTVNKLINV |
| | PPKTPYGGGFGVDQYTLKYLYEEYRFAQNIWTQSNVLKDLCRYINVKLIFY |
| | RDNKTDFVLSYDRNPPFQLTKFTYPGAHPQQIMLQKHHKFILSQMTKPNGR |
| | LTKKLKIKPPKQMLSKWFFSKQFCKYPLLSLKASALDLRHSYLGCCNENPQ |
| | VFFYYLNHGYYTITNWGAQSSTAYRPNSKVTDTTYYRYKNDRKNINIKSHE |
| | YEKSISYENGYFQSSFLQTQCIYTSERGEACIAEKPLGIAIYNPVKDNGDGNM |
| | IYLVSTLANTWDQPPKDSAILIQGVPIWLGLFGYLDYCRQIKADKTWLDSHV |
| | LVIQSPAIFTYPNPGAGKWYCPLSQSFINGNGPFNQPPTLLQKAKWFPQIQYQ |
| | QEIINSFVESGPFVPKYANQTESNWELKYKYVFTFKWGGPQFHEPEIADPSK |
| | QEQYDVPDTFYQTIQIEDPEGQDPRSLIHDWDYRRGFIKERSLKRMSTYFST |
| | HTDQQATSEEDIPKKKKRIGPQLTVPQQKEEETLSCLLSLCKKDTFQETETQE |
| | DLQQLIKQQQEQQLLLKRNILQLIHKLKENQQMLQLHTGMLP (SEQ ID NO: |
| | 891) |
| ORF1/1 | MPFWWRRRRKFWTNNRFNYTKRRRYRKRWPRRRRRRRPYRRPVRRRRRK |
| | LRKWGGPQFHEPEIADPSKQEQYDVPDTFYQTIQIEDPEGQDPRSLIHDWDY |
| | RRGFIKERSLKRMSTYFSTHTDQQATSEEDIPKKKKRIGPQLTVPQQKEEETL |
| | SCLLSLCKKDTFQETETQEDLQQLIKQQQEQQLLLKRNILQLIHKLKENQQM |
| | LQLHTGMLP (SEQ ID NO: 892) |
| ORF1/2 | MPFWWRRRRKFWTNNRFNYTKRRRYRKRWPRRRRRRRPYRRPVRRRRRK |
| | LRKISKQLQRKTFPKRKRELDPNSQSHNKKKRRHCHVSSLSAKKIPSKKQRH |
| | KKTSSSSSSSSRSSSSSSRETSSSSSTN (SEQ ID NO: 893) |

TABLE N18
Exemplary Anellovirus nucleic acid sequence
(Alphatorquevirus) - Clade 1

| | |
|---|---|
| Name | Ring5.2 |
| Genus/Clade | Alphaatorquevirus Clade 1 |
| Accession Number | |
| Full Sequence: 3696 bp | |

(SEQ ID NO: 894)
Annotations:

| Putative Domain | Base range |
|---|---|
| TATA Box | 85-91 |
| Cap Site | 108-115 |
| Transcriptional Start Site | 115 |
| 5′ UTR Conserved Domain | 178-248 |
| ORF2 | 300-692 |
| ORF2/2 | 300-688; 2282-2804 |
| ORF2/3 | 300-688; 2484-2976 |
| ORF2t/3 | 300-349: 2484-2976 |
| TAIP | 322-471 |
| ORF1 | 572-2758 |
| ORF1/1 | 572-688; 2282-2758 |
| ORF1/2 | 572-688; 2484-2804 |
| Three open-reading frame region | 2484-2755 |
| Poly(A) Signal | 3018-3023 |
| GC-rich region | 3555-3696 |

TABLE A18
Exemplary Anellovirus amino acid sequences (Alphatorquevirus) Clade 1
Ring 5.2 (Alphaatorquevirus) Clade 1

| | |
|---|---|
| ORF2 | MPWRPPVHSVQGREDQWFASFFHGHDSFCGCGDPLGHINSIAHRFPRAGPP |
| | RPPPGLDQPNPREQGPAGPGGPPAILALPAPPAEPDDPQPRRGGGDGGAAAG |
| | AADDHTQRDYDEEELDELFRAAAEDDL (SEQ ID NO: 895) |
| ORF2/2 | MPWRPPVHSVQGREDQWFASFFHGHDSFCGCGDPLGHINSIAHRFPRAGPP |
| | RPPPGLDQPNPREQGPAGPGGPPAILALPAPPAEPDDPQPRRGGGDGGAAAG |
| | AADDHTQRDYDEEELDELFRAAAEDDFQSTTPASREPTRFPTPINTLASYKS |
| | RTRNYSDRGQCSTSGTSDVGSLAKEVLRECQNTQAMMNLLRQVSHQSETSS |
| | TRRSEEKIESKKNAILSSKRSRKKRPQKKKNQHPKKKPRKRSYSTSSSSRDAT |
| | SESSDEGSSSSLQTSSDSARESTGTRSSHSAPTLHTRPAFSQYW (SEQ ID NO: |
| | 896) |
| ORF2/3 | MPWRPPVHSVQGREDQWFASFFHGHDSFCGCGDPLGHINSIAHRFPRAGPP |
| | RPPPGLDQPNPREQGPAGPGGPPAILALPAPPAEPDDPQPRRGGGDGGAAAG |
| | AADDHTQRDYDEEELDELFRAAAEDDLSPIKAKQARLGVPRRKSRAKRMLF |
| | SPQSARGRRDPRRRRTSTPRKSPERGATPPAPAPETPPASPQTRAQARLYRHP |
| | PTPPGSPLEPGAHIAPPPYIPDLLFPNTGKKKKFSPFDWETEAQIAGWMRRPM |
| | RFYPSDTPHYPWLPPERDIPKICNINFKIKLQ (SEQ ID NO: 897) |
| ORF2t/3 | MPWRPPVHSVQGREDQWSPIKAKQARLGVPRRKSRAKRMLFSPQSARGRR |
| | DPRRRRTSTPRKSPERGATPPAPAPETPPASPQTRAQARLYRHPPTPPGSPLEP |
| | GAHIAPPPYIPDLLFPNTGKKKKFSPFDWETEAQIAGWMRRPMRFYPSDTPH |
| | YPWLPPERDIPKICNINFKIKLQE (SEQ ID NO: 898) |
| TAIP | IVSRGERISGSQAFFTATIRFAAAVTLLAILIALLIAFLAPVHQGPLRG (SEQ ID |
| | NO: 899) |
| ORF1 | TAWWWGRWRRRWRRRRPYTTRLRRRRARRAFPRRRRRRFVSRRWRRPYR |
| | RRRRRGRRRRRRRRRHKPTLILRQWQPDCIRHCKITGWMPLIICGKGSTQFN |
| | YITHADDITPRGASYGGNFTNMTFSLEAIYEQFLYHRNRWSASNHDLELCRY |
| | KGTTLKLYRHPEVDYIVTYSRTGPFEISHMTYLSTHPMLMLLNKHHIVVPSL |
| | KTKPRGRKAIKVRIRPPKLMNNKWYFTRDFCNIGLFQLWATGLELRNPWLR |
| | MSTLSPCIGFNVLKNSIYTNLSNLPQYKNERLNIINNILHPQEITGTNNKKWQ |
| | YTYTKLMAPIYYSANRASTYDWENYSKETNYNNTYVKFTQKRQEKLTKIR |
| | KEWQMLYPQQPTALPDSYDLLQEYGLYSPYYLNPTRINLDWMTPYTHVRY |
| | NPLVDKGFGNRIYIQWCSEADVSYNRTKSKCLLQDMPLFFMCYGYIDWAIK |
| | NTGVSSLVKDARICIRCPYTEPQLVGSTEDIGFVPISETFMRGDMPVLAPYIPL |
| | SWFCKWYPNIAHQKEVLESIISCSPFMPRDQDMNGWDITIGYKMDFLWGGS |
| | PLPSQPIDDPCQQGTHPIPDPDKHPRLLQVSNPKLLGPRTVFHKWDIRRGQFS |
| | KRSIKRVSEYSSDDESLAPGLPSKRNKLDSAFRGENREQKECYSLLKALEEE |
| | ETPEEEEPAPQEKAQKEELLHQLQLQRRHQRVLRRGLKLVFTDILRLRQGVH |
| | WNPELT (SEQ ID NO: 900) |
| ORF1/1 | TAWWWGRWRRRWRRRRPYTTRLRRRRARRAFPRRRRRRFPIDDPCQQGT |
| | HPIPDPDKHPRLLQVSNPKLLGPRTVFHKWDIRRGQFSKRSIKRVSEYSSDDE |
| | SLAPGLPSKRNKLDSAFRGENREQKECYSLLKALEEEETPEEEEPAPQEKAQ |
| | KEELLHQLQLQRRHQRVLRRGLKLVFTDILRLRQGVHWNPELT (SEQ ID |
| | NO: 901) |
| ORF1/2 | TAWWWGRWRRRWRRRRPYTTRLRRRRARRAFPRRRRRRFVSHQSETSSTR |
| | RSEEKIESKKNAILSSK |
| | RSRKKRPQKKKNQHPKKKPRKRSYSTSSSSRDATSESSDEGSSSSLQTSSDSA |
| | RESTGTRSSHSAPTLHTRPAFSQYW (SEQ ID NO: 902) |

TABLE N19
Exemplary Anellovirus nucleic acid sequence
(Alphatorquevirus) - Clade 3

| | |
|---|---|
| Name | Ring 6.0 |
| Genus/Clade | Alphatorquevirus - Clade 3 |
| Accession Number | |
| Full Sequence: 3828 bp | |

(SEQ ID NO: 903)
Annotations:

| Putative Domain | Base range |
|---|---|
| TATA Box | 85-92 |
| Cap Site | 109-116 |
| Transcriptional Start Site | 116 |
| 5′ UTR Conserved Domain | 176-246 |
| ORF2 | 351-710 |
| ORF2/2 | 351-706; 2360-2825 |
| ORF2/3 | 351-706; 2556-3060 |
| TAIP | 373-528 |
| ORF1 | 581-2884 |
| ORF1/1 | 581-706; 2360-2884 |
| ORF1/2 | 581-706; 2556-2825 |
| Three open-reading frame region | 2556-2821 |
| Poly(A) Signal | 3055-3061 |
| GC-rich region | 3720-3828 |

TABLE A19
Exemplary Anellovirus amino acid sequences (Alphatorquevirus)-Clade 3
Ring 6.0 (Alphatorquevirus)

| | |
|---|---|
| ORF2 | MWRPPTRNAFNIQRDWFYSCFHSHASMCGCADFIGHFNHIAAMLGRPEDQ |
| | NPPPPPGALRPLPALPASSEAPGDRAPWPMGGGGGDGGARGGGGDGAAGD |
| | AVGDPADADLVAAIDAAEQ (SEQ ID NO: 904) |
| ORF2/2 | MWRPPTRNAFNIQRDWFYSCFHSHASMCGCADFIGHFNHIAAMLGRPEDQ |
| | NPPPPPGALRPLPALPASSEAPGDRAPWPMGGGGGDGGARGGGGDGAAGD |
| | AVGDPADADLVAAIDAAEQLLETPARPPKVPRAIECLDQYKSLTRGTTRONS |
| | PYTRGTSDMGSLAEKLLRECKNNQYLMTLFQQGSSAVAEIQKHSNAAKKS |
| | NKKKTYFSQSSSSSESPRGRPRKRAKARKKTRKNRRPSPSNSETSCTSSGSW |
| | ESNSDRSSTKCRGSNKINT (SEQ ID NO: 905) |
| ORF2/3 | MWRPPTRNAFNIQRDWFYSCFHSHASMCGCADFIGHFNHIAAMLGRPEDQ |
| | NPPPPPGALRPLPALPASSEAPGDRAPWPMGGGGGDGGARGGGGDGAAGD |
| | AVGDPADADLVAAIDAAEQVQAQSPRYRSTPMQPRRATKRKLTFPSPAAQA |
| | SPPVGDLAREPKRGRKLAKTGDPLPATQRPAAQAAAHGRATPIAPLPNAEG |
| | PTKSTHKPYVIAKGSGINFYFSQCNIDMFGDPKPYKPSSNDWKEEYEAAKY |
| | WDRPPRRDLRSTPFYPWAPTPKPYNVNFALNYK (SEQ ID NO: 906) |
| TAIP | MRSIFNVTGSTVAFTPTLLCAAVLILLVISIISLLCSAVRKTRTLLRHPGL (SEQ |
| | ID NO: 907) |
| ORF1 | MAYGWWRRRRRRPWWRRRWRRWRRRRRPRRRRPRRRYRRRRTVRRRGR |
| | GRWTRAHRRWRRKGKRSRKKKIIIRQWQPNYTRRCNIVGYMPLLICGENTV |
| | ATNYATHSDDSYYPGPFGGGMTTDKFTLRILYDEYKRFMNYWTSSNEDLD |
| | LCRYLGCTLYVFRHPEVDFIIIINTSPPFLDTEITGPSIHPGMMALNKRSRWIPS |
| | IKNRPGRKHYIKIKVGAPRMFTDKWYPQTDLCDMTLLTIFASAADMQYPFG |
| | SPLTDTIVVSFQVLQSMYNDCLSVLPDNFAETSGKGTQLHENIIQHLPYYNTT |
| | QTQAQFKRFIENMNATNGDNIWASYINTTKFSSANTPKNDTGIGGPYTTYSD |
| | SWYKGTVYNDKIKTIPIKASKLYYEQTKNLIGITFTGSTHRLHYCGGLYSSV |
| | WLSAGRSYFETKGPYTDITYNPFSDRGEGNMLWIDWLTKNDSVYSKTSSKC |
| | LIENLPLWASVYGYKEYCSKVTGDTNIEHNCRCVIRSPYTVPQLLDHNNPFR |
| | GYVPYSFNFGNGKMPGGSSLVPIRMRAKWYPTLFHQKEVLEAIAQAGPFAY |
| | HSDIKKVSLGIKYRFKWVWGGNPVSQQVVRNPCKTTQGSSGNRVPRSIQVV |
| | DPRYNTPELTIHAWDFRHGFFGRKAIKRMQEQPIPHDTFSAGFKRSRRDTEA |
| | LQCSQEEQQKENLLFPVQQLKRVPPWETSQESQSEEENSQKQETLSQQLRD |
| | QLHKQRLMGEQLRSLLYQMQRVQQNQHINPMLLPKGLALTSISHNVI (SEQ |
| | ID NO: 908) |
| ORF1/1 | MAYGWWRRRRRRPWWRRRWRRWRRRRRPRRRRPRRRYRRRRTVVRNPC |
| | KTTQGSSGNRVPRSIQVVDPRYNTPELTIHAWDFRHGFFGRKAIKRMQEQPI |
| | PHDTFSAGFKRSRRDTEALQCSQEEQQKENLLFPVQQLKRVPPWETSQESQS |
| | EEENSQKQETLSQQLRDQLHKQRLMGEQLRSLLYQMQRVQQNQHINPMLL |
| | PKGLALTSISHNVI (SEQ ID NO: 909) |
| ORF1/2 | MAYGWWRRRRRRPWWRRRWRRWRRRRRPRRRRPRRRYRRRRTGSSAVA |
| | EIQKHSNAAKKSNKKKTYFSQSSSSSESPRGRPRKRAKARKKTRKNRRPSPS |
| | NSETSCTSSGSWESNSDRSSTKCRGSNKINT (SEQ ID NO: 910) |

TABLE N20
Exemplary Anellovirus nucleic acid sequence
(Alphatorquevirus) - Clade 7

| | |
|---|---|
| Name | Ring7 |
| Genus/Clade | Alphatorquevirus - Clade 7 |
| Accession Number | |
| Full Sequence: 3815 bp | |

(SEQ ID NO: 911)
Annotations:

| Putative Domain | Base range |
|---|---|
| TATA Box | 82-87 |
| Cap Site | 103-110 |
| Transcriptional Start Site | 110 |
| 5′ UTR Conserved Domain | 170-240 |
| ORF2 | 351-740 |
| ORF2/2 | 351-737; 2378-2843 |
| ORF2/3 | 351-737; 2526-3057 |
| TAIP | 379-543 |
| ORF1 | 614-2911 |
| ORF1/1 | 614-737; 2378-2911 |
| ORF1/2 | 614-737; 2526-2843 |
| Three open-reading frame region | 2526-2840 |
| Poly(A) Signal | 3056-3062 |
| GC-rich region | 3716-3815 |

TABLE A20
Exemplary Anellovirus amino acid sequences (Alphatorquevirus)-Clade 7
Ring7.0 (Alphatorquevirus)

| | |
|---|---|
| ORF2 | MSIWRPPLGNVSYRERNWLQAVETSHSSFCGCGDFILHLTNLAARFALQGPP |
| | PEGGPPRPRPPLLRALPAPEVRRETRTENRGASGEPWPGDGGGRDDGAAAG |
| | GPADGGDAYDAGDLDDLFAAVEEEQQ (SEQ ID NO: 912) |
| ORF2/2 | MSIWRPPLGNVSYRERNWLQAVETSHSSFCGCGDFILHLTNLAARFALQGPP |
| | PEGGPPRPRPPLLRALPAPEVRRETRTENRGASGEPWPGDGGGRDDGAAAG |
| | GPADGGDAYDAGDLDDLFAAVEEEQQLSRTRVTESSPSLPIPIDNVATYKLL |
| | THQPWARSTPSTHGTGDGGFLVQMLSRECHKNREMLSALQTLSRDPDIFPR |
| | QTEKTTDKKKTSLYRKKDGAHPQKKPRTRRAPRKARRSYSSSSSSGSSQSTS |
| | RSSSDSESNSDTSSKKSSKRKRVST (SEQ ID NO: 913) |
| ORF2/3 | MSIWRPPLGNVSYRERNWLQAVETSHSSFCGCGDFILHLTNLAARFALQGPP |
| | PEGGPPRPRPPLLRALPAPEVRRETRTENRGASGEPWPGDGGGRDDGAAAG |
| | GPADGGDAYDAGDLDDLFAAVEEEQQCYPESVTKTGRCSPLYKPFQETQIS |
| | SPDRQRRLPTRRRLRFTGKKTAHIHRRSPGRGEPPGKRAAPTAAAAAAAALS |
| | PPRGAAATRSPTPIHPPRSPQNASGSPPKPPIIRPATNKVYLFEPSKGLLPIVGK |
| | EAWEDEYCTCKYWDRPPRTNHLDIPTYPWMPTNFKVSFKLGFKP (SEQ ID |
| | NO: 914) |
| TAIP | MSPTGREIGFRPSKHPTVLFVAVVILFFILLIWLHALLSRGPRQRVVHLGRGR |
| | RS (SEQ ID NO: 915) |
| ORF1 | MAWRWWWQRRWRRRRWPRRRWRRLRRRRPRRPVRRRRRRTTVRRRRW |
| | RGRRGRRTYTRRAVRRRRRPRKRLVLTQWSPQTVRNCSIRGIVPMVICGHT |
| | KAGRNYAIHSEDFTTQIQPFGGSFSTTTWSLKVLWDEHQKFQNRWSYPNTQ |
| | LDLARYRGVTFWFYRDQKTDYIVQWSRNPPFKLNKYSSAMYHPGMMMQA |
| | KRKLVVPSFQTRPKGKKRYRVTIKPPNMFADKWYTQEDLCPVPLVQIVVSA |
| | ASLLHPFCPPQTNNPCITFQVLKDIYDECIGVNETMKDKYKKLQTTLYTTCT |
| | YYQTTQVLAQLSPAFQPAMKPTTTQSAATATTLGNYVPELKYNNGSFHTGQ |
| | NAVFGMCSYKPTDSIMTKANGWFWQNLMVDNNLHSSYGKATLECMEYHT |
| | GIYSSIFLSPQRSLEFPAAYQDVTYNPNCDRAVGNVVWFQYSTKMDTNFDE |
| | TKCKCVLKNIPLWAAFNGYSDFIMQELSISTEIHNFGIVCFQCPYTFPPCENK |
| | NKPLKGYVFYDTTFGNGKMPDGSGHVPIYWQQRWWIRLAFQVQVMHDFV |
| | LTGPFSYKDDLANTTLTARYKFKFKWGGNIIPEQIIKNPCHREQSLASYPDRQ |
| | RRDLQVVDPSTMGPIYTFHTWDWRRGLFGADAIQRVSQKPGDALRFTNPFK |
| | RPRYLPPTDREDYRQEEDFALQEKRRRTSTEEAQDEESPPESAPLLQQQQQQ |
| | RQLSVHLAEQQRLGVQLRYILQEVLKTQAGLHLNPLLLGPPQTRSISLSPPKA |
| | YSP (SEQ ID NO: 916) |
| ORF1/1 | MAWRWWWQRRWRRRRWPRRRWRRLRRRRPRRPVRRRRRRTTIIKNPCHR |
| | EQSLASYPDRQRRDLQVVDPSTMGPIYTFHTWDWRRGLFGADAIQRVSQKP |
| | GDALRFTNPFKRPRYLPPTDREDYRQEEDFALQEKRRRTSTEEAQDEESPPE |
| | SAPLLQQQQQQRQLSVHLAEQQRLGVQLRYILQEVLKTQAGLHLNPLLLGP |
| | PQTRSISLSPPKAYSP (SEQ ID NO: 917) |
| ORF1/2 | MAWRWWWQRRWRRRRWPRRRWRRLRRRRPRRPVRRRRRRTTMLSRECH |
| | KNREMLSALQTLSRDPDIFPRQTEKTTDKKKTSLYRKKDGAHPQKKPRTRR |
| | APRKARRSYSSSSSSGSSQSTSRSSSDSESNSDTSSKKSSKRKRVST (SEQ ID |
| | NO: 918) |

[1662] Ring9 is an Anellovirus that was isolated from whole blood. In some embodiments, a method described herein comprises delivering an Anellovector (e.g., an Anellovector having sequence similarity to Ring9) to blood cells (e.g., to the blood cells of a subject).

TABLE N21
Exemplary Anellovirus nucleic acid sequence (Betatorquevirus)

| | |
|---|---|
| Name | Ring9 |
| Genus/Clade | Betatorquevirus |
| Accession Number | MH649263.1 |
| Full Sequence: 2845 bp | |

(SEQ ID NO: 1001)
Annotations:

| Putative Domain | Base range |
|---|---|
| TATA Box | 142-148 |
| Initiation Element | 162-177 |
| Transcriptional Start Site | 172 |
| 5′ UTR Conserved Domain | 226-296 |
| ORF2 | 328-651 |
| ORF2/2 | 328-647; 2121-2457 |
| ORF2/3 | 328-647; 2296-2680 |
| ORF1 | 510-2477 |
| ORF1/1 | 510-647; 2121-2477 |
| ORF1/2 | 510-647; 2296-2457 |
| Three open-reading frame region | 2296-2454 |
| GC-rich region | 2734-2845 |

TABLE A21
Exemplary Anellovirus amino acid sequences (Betatorquevirus)
Ring9 (Betatorquevirus)

| | |
|---|---|
| ORF2 | MSKQLKPTLYKDKSLELQWLNNIFSSHDLCCGCNDPVLHLLILINKTGEAPK |
| | PEEDIKNIKCLLTGAKNTTEEDIDLSPGELEELFKEEKDGDTANQEKHTGEEN |
| | CG (SEQ ID NO: 1002) |
| ORF2/2 | MSKQLKPTLYKDKSLELQWLNNIFSSHDLCCGCNDPVLHLLILINKTGEAPK |
| | PEEDIKNIKCLLTGAKNTTEEDIDLSPGELEELFKEEKDGDTANQEKHTGEEN |
| | CGPIGLFPITSMKQYKSRIQTHAHKQNSKNGTGDVILLQKKLSKELDNTRNL |
| | MKLCKSLQVPNTTHQYTDKHHRGRTQKRTRKRKKTKHKRSRSSSTSSESIN |
| | SISSSSSSST (SEQ ID NO: 1003) |
| ORF2/3 | MSKQLKPTLYKDKSLELQWLNNIFSSHDLCCGCNDPVLHLLILINKTGEAPK |
| | PEEDIKNIKCLLTGAKNTTEEDIDLSPGELEELFKEEKDGDTANQEKHTGEEN |
| | CGFQTQPTSTQTNITVDGLRNGLGRGKRPNTRDPDPAQQAQKASTASQAAA |
| | QAVPETPKYRIVASNIKVELFPTKKPFKNRRFTPSERETERQCAKAFCRPERH |
| | FFYDPPFYPYCVPEPIVNFALGYKI (SEQ ID NO: 1004) |
| ORF1 | MPPYWRQKYYRRRYRPFSWRTRRIIQRRKRWRYRKPRKTYWRRKLRVRKR |
| | FYKRKLKKIVLKQFQPKIIRRCTIFGTICLFQGSPERANNNYIQTIYSYVPDKE |
| | PGGGGWTLITESLSSLWEDWEHLKNVWTQSNAGLPLVRYGGVTLYFYQSA |
| | YTDYIAQVENCYPMTDTKYTHADSAPNRMLLKKHVIRVPSRETRKKRKPYK |
| | RVRVGPPSQMONKWYFORDICEIPLIMIAATAVDFRYPFCASDCASNNLTLT |
| | CLNPLLFQNQDFDHPSDTQGYFPKPGVYLYSTQRSNKPSSSDCIYLGNTKDN |
| | QEGKSASSLMTLKTQKITDWGNPFWHYYIDGSKKIFSYFKPPSQLDSSDFEH |
| | MTELAEPMFIQVRYNPERDTGQGNLIYVTENFRGQHWDPPSSDNLKLDGFP |
| | LYDMCWGFIDWIEKVHETENLLTNYCFCIRSSAFNEKKTVFIPVDHSFLTGFS |
| | PYETPVKSSDQAHWHPQIRFQTKSINDICLTGPGCARSPYGNYMQAKMSYK |
| | FHVKWGGCPKTYEKPYDPCSQPNWTIPHNLNETIQIQNPNTCPQTELQEWD |
| | WRRDIVTKKAIERIRQHTEPHETLQISTGSKHNPPVHRQTSPWTDSETDSEEE |
| | KDQTQEIQIQLNKLRKHQQHLKQQLKQYLKPQNIE (SEQ ID NO: 1005) |
| ORF1/1 | MPPYWRQKYYRRRYRPFSWRTRRIIQRRKRWRYRKPRKTYWRRKLRPNW |
| | TIPHNLNETIQIQNPNTCPQTELQEWDWRRDIVTKKAIERIRQHTEPHETLQIS |
| | TGSKHNPPVHRQTSPWTDSETDSEEEKDQTQEIQIQLNKLRKHQQHLKQQL |
| | KQYLKPQNIE (SEQ ID NO: 1006) |
| ORF1/2 | MPPYWRQKYYRRRYRPFSWRTRRIIQRRKRWRYRKPRKTYWRRKLRVPNT |
| | THQYTDKHHRGRTQKRTRKRKKTKHKRSRSSSTSSESINSISSSSSSST (SEQ |
| | ID NO: 1007) |

[1663] Ring10 is an Anellovirus that was isolated from lung tissue. In some embodiments, a method described herein comprises delivering an Anellovector (e.g., an Anellovector having sequence similarity to Ring10) to lung tissue (e.g., to the lung of a subject).

TABLE N22
Exemplary Anellovirus nucleic acid sequence (Betatorquevirus)

| | |
|---|---|
| Name | Ring10 |
| Genus/Clade | Betatorquevirus |
| Accession Number | JX134044.1 |
| Full Sequence: 2912 bp | |

(SEQ ID NO: 1008)
Annotations:

| Putative Domain | Base range |
|---|---|
| TATA Box | 152-158 |
| Initiation Element | 172-187 |
| Transcriptional Start Site | 182 |
| 5′ UTR Conserved Domain | 239-309 |
| ORF2 | 343-633 |
| ORF2/2 | 343-629; 2196-2505 |
| ORF2/3 | 343-629; 2371-2734 |
| ORF1 | 522-2540 |
| ORF1/1 | 522-629; 2196-2540 |
| ORF1/2 | 522-629; 2371-2505 |
| Three open-reading frame region | 2276-2502 |
| GC-rich region | 2803-2912 |

TABLE A22
Exemplary Anellovirus amino acid sequences (Betatorquevirus)
Ring10 (Betatorquevirus)

| | |
|---|---|
| ORF2 | MFKSPTYLTTKGKNNALINCFVGDHDLLCSCNNPAYHCLQILATTLAPQLK |
| | QEEKQQIIQCLGGTDAVATTRGDEEIGLEDLEKLFTEDTEEDAAG (SEQ ID |
| | NO: 1009) |
| ORF2/2 | MFKSPTYLTTKGKNNALINCFVGDHDLLCSCNNPAYHCLQILATTLAPQLK |
| | QEEKQQIIQCLGGTDAVATTRGDEEIGLEDLEKLFTEDTEEDAAGQHMLFPI |
| | TSMKQLRYRIQPPDQSTSCTPLTKGGDNLQKKLQNACLKTGKLKKLLYCLQ |
| | NTDSRSQHKHKPHKRTRPRKKKKRATSSSDSSDSEPSSSSSSAE (SEQ ID NO: |
| | 1010) |
| ORF2/3 | MFKSPTYLTTKGKNNALINCFVGDHDLLCSCNNPAYHCLQILATTLAPQLK |
| | QEEKQQIIQCLGGTDAVATTRGDEEIGLEDLEKLFTEDTEEDAAGIQIRGANT |
| | NTSPTRGPVLGRRRREQPLRATPPTANQAAPAQAQNNTNIERPTKIRITNSKN |
| | TVYLFPPEQKNRRLTPWEIQEDKEIANLFGRPHRYFLKDIPFYWDIPPEPKVN |
| | FDLNFQ (SEQ ID NO: 1011) |
| ORF1 | MPWWYRRRSYNPWRRRNWFRRPRKTIYRRYRRRRRWVRRKPFYKRKIKR |
| | LNIVEWQPKSIRKCRIKGMLCLFQTTEDRLSYNFDMYEESIIPEKLPGGGGFSI |
| | KNISLYALYQEHIHAHNIFTHTNTDRPLARYTGCSLKFYQSKDIDYVVTYSTS |
| | LPLRSSMGMYNSMQPSIHLMQQNKLIVPSKQTQKRRKPYIKKHISPPTQMKS |
| | QWYFQHNIANIPLLMIRTTALTLDNYYIGSRQLSTNVTIHTLNTTYIQNRDW |
| | GDRNKTYYCQTLGTQRYFLYGTHSTAQNINDIKLQELIPLINTQDYVQGFD |
| | WTEKDKHNITTYKEFLTKGAGNPFHAEWITAQNPVIHTANSPTQIEQIYTAS |
| | TTTFQNKKLTDLPTPGYIFITPTVSLRYNPYKDLAERNKCYFVRSKINAHGW |
| | DPEQHQELINSDLPQWLLLFGYPDYIKRTQNFALVDTNYILVDHCPYTNPEK |
| | TPFIPLSTSFIEGRSPYSPSDTHEPDEEDQNRWYPCYQYQQESINSICLSGPGTP |
| | KIPKGITAEAKVKYSFNFKWGGDLPPMSTITNPTDQPTYVVPNNFNETTSLQ |
| | NPTTRPEHFLYSFDERRGQLTEKATKRLLKDWETKETSLLSTEYRFAEPTQT |
| | QAPQEDPSSEEEEESNLFERLLRQRTKQLQLKRRIIQTLKDLQKLE (SEQ ID |
| | NO: 1012) |
| ORF1/1 | MPWWYRRRSYNPWRRRNWFRRPRKTIYRRYRRRRRWPTYVVPNNFNETT |
| | SLQNPTTRPEHFLYSFDERRGQLTEKATKRLLKDWETKETSLLSTEYRFAEP |
| | TQTQAPQEDPSSEEEEESNLFERLLRQRTKQLQLKRRIIQTLKDLQKLE (SEQ |
| | ID NO: 2706) |
| ORF1/2 | MPWWYRRRSYNPWRRRNWFRRPRKTIYRRYRRRRRWNTDSRSQHKHKPH |
| | KRTRPRKKKKRATSSSDSSDSEPSSSSSSAE (SEQ ID NO: 1013) |

TABLE N23
Exemplary Anellovirus nucleic acid
sequence (Alphatorquevirus, Clade 4)

| | |
|---|---|
| Name | Ring20 |
| Genus/Clade | Alphatorquevirus Clade 4 |
| Accession Number | AF122914.3 |
| Full Sequence: 3853 bp | |

(SEQ ID NO: 1014)
Annotations:

| Putative Domain | Base range |
|---|---|
| TATA Box | 86-90 |
| Initiation Element | 104-119 |
| Transcriptional Start Site | 114 |
| 5′ UTR Conserved Domain | 174-244 |
| ORF2 | 354-716 |
| ORF2/2 | 354-712; 2372-2873 |
| ORF2/3 | 354-712; 2565-3075 |
| ORF2t/3 | 354-400; 2565-3075 |
| TAIP | 373-690 |
| ORF1 | 590-2899 |
| ORF1/1 | 590-712; 2372-2899 |
| ORF1/2 | 590-712; 2565-2873 |
| Three open-reading frame region | 2551-2870 |
| Poly(A)-Signal | 3071-3076 |
| GC-rich region | 3733-3853 |

TABLE A23
Exemplary Anellovirus amino acid sequences (Alphatorquevirus)
Ring20 (Alphatorquevirus Clade 4)

| ORF2 | MWTPPRNDQQYLNWQWYTSVLSSHSAMCGCSDAIAHLNHLANLLRAPQN |
|---|---|
| | PPPPDNPRPLPVRALPAPPAAHEAAGDRAPWPMGGGGDAGGAGAGGDADH |
| | GGAAGGPADADLLDAVAAAET (SEQ ID NO: 1015) |
| ORF2/2 | MWTPPRNDQQYLNWQWYTSVLSSHSAMCGCSDAIAHLNHLANLLRAPQN |
| | PPPPDNPRPLPVRALPAPPAAHEAAGDRAPWPMGGGGDAGGAGAGGDADH |
| | GGAAGGPADADLLDAVAAAETLLEIPARNPTPRAIESLEAYKSLTRDTTHRN |
| | LPSMPGTSDVASLARKLFKECNNNQLLLNFFQQAARDPEGTQKCISPTKKRS |
| | KKKARFSPQSSSSEESPRGRTRNRSKAGRKAQRKRRRPSPSSSNSSCSSSESW |
| | ESNSDSCSTKSKKSNKIKISTLPCYQGGGI (SEQ ID NO: 1016) |
| ORF2/3 | MWTPPRNDQQYLNWQWYTSVLSSHSAMCGCSDAIAHLNHLANLLRAPQN |
| | PPPPDNPRPLPVRALPAPPAAHEAAGDRAPWPMGGGGDAGGAGAGGDADH |
| | GGAAGGPADADLLDAVAAAETPQETQKGHRSVSVRPRKGAKRKLAFPPSQ |
| | APPKSPPVGGLGTGAKRVAKLRGRDGDPLPAAQTAAAAAASLGSQTQTPV |
| | QPSPKNPTKSRYQPYLVTKGGGSSILLSGCTINMFPDPKPYCPSSNDWKEEY |
| | EACKYWDRPPRHNLRDPPFYPWAPKNNPCNVSFKLGFK (SEQ ID NO: 1017) |
| ORF2t/3 | MWTPPRNDQQYLNWQWPQETQKGHRSVSVRPRKGAKRKLAFPPSQAPPKS |
| | PPVGGLGTGAKRVAKLRGRDGDPLPAAQTAAAAAASLGSQTQTPVQPSPK |
| | NPTKSRYQPYLVTKGGGSSILLSGCTINMFPDPKPYCPSSNDWKEEYEACKY |
| | WDRPPRHNLRDPPFYPWAPKNNPCNVSFKLGFK (SEQ ID NO: 1018) |
| TAIP | MINNTLTGNGTLLYLAPTLLCAGVPTLSLILIILLICFVPRKIRPRLIIQDPYPCE |
| | HCLLPRLPTRQPVIEHHGLWVVEETPEALAQVETPTMEAPLEDPQTQTC |
| | (SEQ ID NO: 1019) |
| ORF1 | MAYGWWRRRRRRWRRWRRRPWRRRWRTRRRRPARRRGRRRNVRRRRR |
| | GRWRRRYRRWKRKGRRRRKAKIIIRQWQPNYRRRCNIVGYLPILICGGNTV |
| | SRNYATHSDDTNYPGPFGGGMTTDKFSLRILYDEYKRFMNYWTASNEDLD |
| | LCRYLGCTFYFFRHPEVDFIIKINTMPPFLDTTITAPSIHPGLMALDKRARWIP |
| | SLKNRPGKKHYIKIRVGAPKMFTDKWYPQTDLCDMTLLTIYATAADMQYP |
| | FGSPLTDTVVVNSQVLQSMYDETISILPDEKTKRNSLLTSIRSYIPFYNTTQTI |
| | AQLKPFVDAGGHTTGSTTTTWGQLLNTTKFTTTTTTTYTYPGTTNTAVTFIT |
| | ANDTWYRGTAYKDNIKDVPQKAAQLYFQTTQKLLGNTFHGSDETLEYHAG |
| | LYSSIWLSPGRSYFETPGAYTDIKYNPFTDRGEGNMLWIDWLSKKNMKYDK |
| | VQSKCLVADLPLWAAAYGYVEFCSKSTGDTNIHMNARLLIRSPFTDPQLIVH |
| | TDPTKGFVPYSLNFGNGKMPGGSSNVPIRMRAKWYPTLSHQQEVLEALAQS |
| | GPFAYHSDIKKVSLGIKYRFKWIWGGNPVRQQVVRNPCKEPHSSGNRVPRSI |
| | QIVDPRYNSPELTIHAWDFRRGFFGPKAIQRMQQQPTATEFFSAGRKRPRRD |
| | TEVYQSDQEKEQKESSLFPPVKLLRRVPPWEDSEQEQSGSQSSEEETATLSQ |
| | QLKQQLQQQRVLGVKLRLLFNQVQKIQQNQDINPTLLPRGGDLVSFFQAVP |
| | (SEQ ID NO: 1020) |
| ORF1/1 | MAYGWWRRRRRRWRRWRRRPWRRRWRTRRRRPARRRGRRRNVVRNPC |
| | KEPHSSGNRVPRSIQIVDPRYNSPELTIHAWDFRRGFFGPKAIQRMQQQPTAT |
| | EFFSAGRKRPRRDTEVYQSDQEKEQKESSLFPPVKLLRRVPPWEDSEQEQSG |
| | SQSSEEETATLSQQLKQQLQQQRVLGVKLRLLFNQVQKIQQNQDINPTLLPR |
| | GGDLVSFFQAVP (SEQ ID NO: 1021) |
| ORF1/2 | MAYGWWRRRRRRWRRWRRRPWRRRWRTRRRRPARRRGRRRNAARDPEG |
| | TQKCISPTKKRSKKKARFSPQSSSSEESPRGRTRNRSKAGRKAQRKRRRPSPS |
| | SSNSSCSSSESWESNSDSCSTKSKKSNKIKISTLPCYQGGGI (SEQ ID NO: |
| | 1022) |

TABLE N24
Exemplary Anellovirus nucleic acid sequence (Alphatorquevirus)

| | |
|---|---|
| Name | Ring18 |
| Genus/Clade | Alphatorquevirus |
| Accession Number | |
| Full Sequence: 3733 bp | |

(SEQ ID NO: 2507)
Annotations:

| Putative Domain | Base range |
|---|---|
| TATA Box | 67-71 |
| Cap Site | 88-95 |
| Transcriptional Start Site | 95 |
| 5′ UTR Conserved Domain | 155-225 |
| ORF2 | 325-687 |
| TAIP | 347-508 |
| ORF2/2 | 325-683, 2295-2790 |
| ORF2/3 | 325-683, 2488-2962 |
| ORF1 | 561-2771 |
| ORF1/1 | 561-683, 2295-2771 |
| ORF1/2 | 561-683, 2488-2790 |
| Three open-reading frame region | 2447-2771 |
| Poly(A) Signal | 2958-2963 |
| GC-rich region | 3627-3718 |

TABLE A24
Exemplary Anellovirus amino acid sequences for Ring 18 (Alphatorquevirus)

| | |
|---|---|
| ORF1 | MAWGFWGRRRRWRRWRPRRRRWRPRRRRRRRPARRFRARRRVRRRGGR |
| | WRRRYRKWRRGRRRRTHRKKIVIKQWQPNFIRRCYIIGYLPLIFCGENTTA |
| | QNYATHSDDMISKGPYGGGMTTTKFTLRILYDEFTRFMNFWTVSNEDLDL |
| | CRYVGCKLIFFKHPTVDFIVQINTQPPFLDTHLTAASIHPGIMMLSKRRILIPS |
| | LKTRPSRKHRVVVRVGAPRLFQDKWYPQSDLCDTVLLSIFATACDLQYPF |
| | GSPLTDNPCVNFQILGPQYKKHLSISSTMDTTNKQHYDSNLFNQTQLYNTF |
| | QTIAQLKETGQTANISPSWSAVONNMALSNTGENATQSKDTWYKGNTYN |
| | NHITTLAQKTRERFKGATKAALQNYPTIMSTDLYEYHSGIYSSIFLSAGRSY |
| | FETTGAYSDIIYNPFTDKGTGNIIWIDYLTKEDTIFVKNKSKCEIMDMPLWA |
| | ACTGYTEFCAKYTGDSAIIYNARVLIRCPYTEPMLIDHSDPNKGFVPYSFNF |
| | GNGKMPGGSSNVPIRMRAKWYVNIFHQKEVLETIVQSGPFGYKGDIKSAV |
| | LAMKYRFHWKWGGNPISKQVVRNPCSNSSSSAAHRGPRSVQAVDPKYNT |
| | PEVTWHSWDIRRGLFGKAGIKRMQQESDALYIPPGPFKRPRRDTNAQDPEE |
| | QNESSGFRVQQRLPWVHSSQETQSSQEETEAQGSVQDQLLLQLREQRVLR |
| | LQLQQLATQVLKVQAGHGIHPLLSSQA (SEQ ID NO: 1100) |
| ORF1/1 | MAWGFWGRRRRWRRWRSRRRRWRPRRRRRRRPARRFRARRRVVRNPCS |
| | NSSSSAAHRGPRSVQAVDPKYNTPEVTWHSWDIRRGLFGKAGIKRMQQES |
| | DALYIPPGPFKRPRRDTNAQDPEEQNESSGFRVQQRLPWVHSSQETQSSQE |
| | ETEAQGSVQDQLLLQLREQRVLRLQLQQLATQVLKVQAGHGIHPLLSSQA |
| | (SEQ ID NO: 2508) |
| ORF1/2 | MAWGFWGRRRRWRRWRPRRRRWRPRRRRRRRPARRFRARRRDHSRDLA |
| | ETRTPKTQKSKTKAQVSESSSDSRGSTPAKRRKAPKKKRRRRGRYKTNYSS |
| | SSESSEYSDSSSSNSQPKSSKSKQGTAYTPYYLPKRKQSLYV (SEQ ID NO: |
| | 2509) |
| ORF2 | MWQPPAHNVPGIERNWYESCFRSHAAVCGCGDFVGHLSYLATTLGRPPRP |
| | GPPGGPRTPQIRNLPALPAPQGEPGDRAPWRGASGADAAGGDGGDHGAD |
| | GGDPADVGDDALLAAFELVEE (SEQ ID NO: 2510) |
| ORF2/2 | MWQPPAHNVPGIERNWYESCFRSHAAVCGCGDFVGHLSYLATTLGRPPRP |
| | GPPGGPRTPQIRNLPALPAPQGEPGDRAPWRGASGADAAGGDGGDHGAD |
| | GGDPADVGDDALLAAFELVEESSGIPAPTPAPPRPIEDLAAYKQLTRNTIPQ |
| | RSRGTRGTSDEDSLAKQVLKECNKNQMLFTFLQDHSRDLAETRTPKTQKS |
| | KTKAQVSESSSDSRGSTPAKRRKAPKKKRRRRGRYKTNYSSSSESSEYSDS |
| | SSSNSQPKSSKSKQGTAYTPYYLPKRKQSLYV (SEQ ID NO: 2511) |
| ORF2/3 | MWQPPAHNVPGIERNWYESCFRSHAAVCGCGDFVGHLSYLATTLGRPPRP |
| | GPPGGPRTPQIRNLPALPAPQGEPGDRAPWRGASGADAAGGDGGDHGAD |
| | GGDPADVGDDALLAAFELVEETIQETSQRHERPRPRRAKRKLRFQSPAATP |
| | VGPLQPRDAKLPRRNGGAGVGTRPTTPPAPRAASTPTPAPATRNPSPQSPSR |
| | ARHTPPIIFPSVNKVFMFEPHGPKPIQGYNDWLEEYTACKFWDRPPRKLHT |
| | DLPFYPWAPKPQDQVRVSFKLNFQ (SEQ ID NO: 2512) |

[1664] Ring19 is an Anellovirus that was isolated from RPE cells. In some embodiments, a method described herein comprises delivering an Anellovector (e.g., an Anellovector having sequence similarity to Ring19) to eye tissue (e.g., to the eye of a subject), for example, to retinal tissue and/or RPE cells.

TABLE N25
Novel Anellovirus nucleic acid sequence (Betatorquevirus)

| | |
|---|---|
| Name | RING 19 |
| Genus/Clade | Betatorquevirus |
| Accession | N/A |
| Full Sequence: 2876 bp | |

(SEQ ID NO: 1023)
Annotations:

| Putative Domain | Base range |
|---|---|
| ORF1 | 283-2250 |
| ORF2 | 59-391 |
| ORF3 | 2277-2462 |
| GC-rich region, or a portion thereof | 2515-2615 |
| 5′ UTR Conserved Domain, or a portion thereof | 1-71 |

TABLE A25
Novel Anellovirus amino acid sequence (Betatorquevirus)
RING 19 (Betatorquevirus)

| | |
|---|---|
| ORF1 | MPWYPRRRYPRRRYRWLRRWRARRPFRPRYRRRYWVRNYSRKRKLFKITT |
| | KEWQPKVIRKTHVKGTYPLFLCTKHRINNNMIQYLDSIAPEHYYGGGGFS |
| | IMQFSLQALYEEFIKAKNWWTNTNCFLPLVRYMGCSFKFYKTEFYDYIVL |
| | IERCYPLACTDEMYLSTQPSIMMLTRKCIFVPCKQNSKGKKPYKKVRVRP |
| | PSQMTTGWHFSQDLANMPLVVLKTSVCSFDRYYTDSTAKSTTIGFKTLNT |
| | QTFRYHDWQEPPTTGYKPQNLLWFYGAENGSPVDPNNTIVSNLIYLGGTG |
| | PYEKGTPIKTNISNYFSEPKLWGNIFHDDYTSGTSPVFVTNKSPSEIKTA |
| | WNTIKDLTVKASGVFTLRTIPLWLPCRYNPFADKATNNKIWLVSIHSDHT |
| | EWKPIDNPLLQRTDLPLWLLVWGWQDWQKKNQQTSQPDINYLTVISSPYI |
| | SCYPKLDYYVLLDEGFWEGHSTYIESITDSDKKHWYPKNRFQIETLNLIA |
| | NTGPGTVKLRENQAAEGHMVYRFNFKLGGCPAPMEKICDPSKQSKYPIPN |
| | NQQQTTSLQSPENPIQTYLYDFDERRGLLTERATKRIKQDHTSEKTVLPF |
| | TGAATDLPILQTTSQEESSSEEEEEQQAEKKLLQLRRKQHRLRERILQLL |
| | DIQNT (SEQ ID NO: 1024) |
| ORF2 | MAERARNLNIIILQMQIQPPIRTFKQTISDWKNLIVHVHDNICNCNKPLE |
| | HTIDTCITNPDELRLNKSTKQQLQKCLGTPEEDTQEDVIDGFADGELDAL |
| | FAQDTEEDTG (SEQ ID NO: 1025) |
| ORF3 | MFGDTHVPNRRMTPEEFEQELIVAGVFRRPPCYYIKDRPTYPYVPKPTDE |
| | KCMVNEDLNFP (SEQ ID NO: 1026) |

TABLE N26
Novel Anellovirus nucleic acid sequence (Betatorquevirus)

| | |
|---|---|
| Name | RING 19 alternate |
| Genus/Clade | Betatorquevirus |
| Accession | N/A |
| Full Sequence: 2876 bp | |

(SEQ ID NO: 1027)
Annotations:

| Putative Domain | Base range |
|---|---|
| ORF1 | 283-2250 |
| ORF2 | 101-391 |
| ORF3 | 2277-2462 |
| GC-rich region, or a portion thereof | 2515-2615 |
| 5′ UTR Conserved Domain, or a portion thereof | 1-71 |

TABLE A26
Novel Anellovirus amino acid sequence (Betatorquevirus)
RING 19 (Betatorquevirus)

| | |
|---|---|
| ORF1 | MPWYPRRRYPRRRYRWLRRWRARRPFRPRYRRRYWVRNYSRKRKLFKITT |
| | KEWQPKVIRKTHVKGTYPLFLCTKHRINNNMIQYLDSIAPEHYYGGGGES |
| | IMQFSLQALYEEFIKAKNWWTNTNCFLPLVRYMGCSFKFYKTEFYDYIVL |
| | IERCYPLACTDEMYLSTQPSIMMLTRKCIFVPCKQNSKGKKPYKKVRVRP |
| | PSQMTTGWHFSQDLANMPLVVLKTSVCSFDRYYTDSTAKSTTIGFKTLNT |
| | QTFRYHDWQEPPTTGYKPQNLLWFYGAENGSPVDPNNTIVSNLIYLGGTG |
| | PYEKGTPIKTNISNYFSEPKLWGNIFHDDYTSGTSPVFVINKSPSEIKTA |
| | WNTIKDLTVKASGVFTLRTIPLWLPCRYNPFADKATNNKIWLVSIHSDHT |
| | EWKPIDNPLLQRTDLPLWLLVWGWQDWQKKNQQTSQPDINYLTVISSPYI |
| | SCYPKLDYYVLLDEGFWEGHSTYIESITDSDKKHWYPKNRFQIETLNLIA |
| | NTGPGTVKLRENQAAEGHMVYRFNFKLGGCPAPMEKICDPSKQSKYPIPN |
| | NQQQTTSLQSPENPIQTYLYDFDERRGLLTERATKRIKQDHTSEKTVLPF |
| | TGAATDLPILQTTSQEESSSEEEEEQQAEKKLLQLRRKQHRLRERILQLL |
| | DIQNT (SEQ ID NO: 1028) |
| ORF2 | MQIQPPIRTFKQTISDWKNLIVHVHDNICNCNKPLEHTIDTCITNPDELR |
| | LNKSTKQQLQKCLGTPEEDTQEDVIDGFADGELDALFAQDTEEDTG |
| | (SEQ ID NO: 1029) |
| ORF3 | MFGDTHVPNRRMTPEEFEQELIVAGVFRRPPCYYIKDRPTYPYVPKPTDE |
| | KCMVNFDLNFP (SEQ ID NO: 1030) |

TABLE N26.1
Novel Anellovirus nucleic acid sequence (Betatorquevirus)

| | |
|---|---|
| Name | RING 19 |
| Genus/Clade | Betatorquevirus |
| Accession | N/A |
| Full Sequence: 2876 bp | |

(SEQ ID NO: 2513)
Annotations:

| Putative Domain | Base range |
|---|---|
| 5′ non-coding region (NCR) | 1-337 |
| 5′ UTR conserved domain | 238-308 |
| ORF2 | 338-624 |
| ORF1 | 520-2487 |
| ORF3 | 2324-2699 |
| 3′ non-coding region (NCR) | 2700-2876 |
| GC-rich region | 2763-2874 |

TABLE N27
Exemplary chicken anemia virus (CAV) nucleic acid sequence

| | |
|---|---|
| Name | CAV isolate Cuxhaven 1 |
| Genus/Clade | Gyrovirus |
| Accession Number | M55918 |
| Full Sequence: 2313 bp | |

(SEQ ID NO: 2771)
Annotations:

| Putative Domain | Base range |
|---|---|
| 5′ UTR | 1-374 |
| Repeat Region | 138-254 |
| CAAT Signal | 255-260 |
| TATA Box | 317-322 |
| VP2 | 374-1024 |
| VP3 (Apoptin) | 480-845 |
| VP1 | 847-2196 |
| 3′ UTR | 2197-2313 |
| GC-Rich Region | 2200-2266 |
| PolyA Signal Sequence | 2281-2286 |

TABLE N28
Alternate exemplary chicken anemia
virus (CAV) nucleic acid sequence

| | |
|---|---|
| Name | CAV isolate Cuxhaven 1 |
| Genus/Clade | Gyrovirus |
| Accession Number | M55918 |
| Full Sequence: 2319 bp | |

(SEQ ID NO: 100)
Annotations:

| Putative Domain | Base range |
|---|---|
| 5′ UTR | 1-379 |
| VP2 | 380-1030 |
| VP3 (Apoptin) | 485-851 |
| VP1 | 853-2202 |
| 3′ UTR | 2203-2319 |

TABLE A28
Exemplary CAV amino acid sequences
CAV

| | |
|---|---|
| VP1 | MARRARRPRGRFYSFRRGRWHHLKRLRRRYKFRHRRRQRYRRRAFRKAFHNPRP |
| | GTYSVRLPNPQSTMTIRFQGVIFLTEGLILPKNSTAGGYADHMYGARVAKISVN |
| | LKEFLLASMNLTYVSKIGGPIAGELIADGSKSQAADNWPNCWLPLDNNVPSATP |
| | SAWWRWALMMMQPTDSCRFFNHPKQMTLQDMGRMFGGWHLFRHIETRFQLLATK |
| | NEGSFSPVASLLSQGEYLTRRDDVKYSSDHQNRWQKGGQPMTGGIAYATGKMRP |
| | DEQQYPAMPPDPPIITATTAQGTQVRCMNSTQAWWSWDTYMSFATLTALGAQWS |
| | FPPGQRSVSRRSFNHHKARGAGDPKGQRWHTLVPLGTETITDSYMSAPASELDT |
| | NFFTLYVAQGTNKSQQYKFGTATYALKEPVMKSDAWAVVRVQSVWQLGNRQRPY |
| | PWDVNWANSTMYWGTQP (SEQ ID NO: 2514) |
| VP2 | MHGNGGQPAAGGSESALSREGQPGPSGAAQGQVISNERSPRRYSTRTINGVQAT |
| | NKFTAVGNPSLQRDPDWYRWNYNHSIAVWLRECSRSHAKICNCGQFRKHWFQEC |
| | AGLEDRSTQASLEEAILRPLRVQGKRAKRKLDYHYSQPTPNRKKAYKTVRWQDE |
| | LADREADFTPSEEDGGTTSSDFDEDINFDIGGDSGIVDELLGRPFTTPAPVRIV |
| | * (SEQ ID NO: 2515) |
| VP3 | MNALQEDTPPGPSTVFRPPTSSRPLETPHCREIRIGIAGITITLSLCGCANARA |
| (Apoptin) | PTLRSATADNSESTGFKNVPDLRTDQPKPPSKKRSCDPSEYRVSELKESLITTT |
| | PSRPRTAKRRIRL* (SEQ ID NO: 2516) |

[1665] YYBYFW is an Anellovirus that was isolated from whole blood. In some embodiments, a method described herein comprises delivering an Anellovector (e.g., an Anellovector having sequence similarity to YYBYFW) to blood cells (e.g., to the blood cells of a subject).

TABLE N29
Novel Anellovirus nucleic acid sequence (Betatorquevirus)

| | |
|---|---|
| Name | YYBYFW |
| Genus/Clade | Betatorquevirus |
| Source tissue | Whole blood |
| Accession | N/A |
| Full Sequence: 2876 bp | |

(SEQ ID NO: 200)
Annotations:

| Putative Domain | Base range |
|---|---|
| GC-rich region | 77-194 |
| TATA box | 346-352 |
| Initiation element | 366-381 |
| 5′ UTR Conserved Domain, or a portion thereof | 433-503 |
| ORF2 | 536-817 |
| ORF1 | 688-2616 |
| ORF3 | 2445-2825 |

TABLE A29
Novel Anellovirus amino acid sequence
(Betatorquevirus)
YYBYFW (Betatorquevirus)

| | |
|---|---|
| ORF1 | MPPYYWRQRRPTWRQRNYRRFRRPRRWRIRSLVRRR |
| | WRRRRRVRNKRLFFRRKKLTRLTLKEWQPKKIKKCSIK |
| | GILPAFICGKSRIANNYILFSESIVPVGEPGGGAWSILQIN |
| | LRVLYDQFIKFKNWWTASNQGLPLTRYLGMKVTFYKT |
| | QFVDYIVIPQLCPPFSVTRDNYLNIHPVRMLMNRHKIIIP |
| | QRQKGKKNYIKKWFRPPDLMQNKWYFQQDIVNIPLIVL |
| | HISAASLDQYSIPENQISTNITLWSLNTDFFRNNQFTGYE |
| | DSGYIPKTFGTQNYYLYTEGNGVSRPTKFSQMIPLKNTT |
| | TYTNGKKAATIENWKENSYWGNPFTQNHASPDVPIYY |
| | NNTTPSENNYSTPQTFTPLHELYFQCRYNPEKDTGIGNK |
| | VFFKSNKLKQGEIDTIPDKDEIVITDFPLWLIFYSWISWI |
| | QKSKPIQHIMNDYYFIVITPFIEPKRKSYLFLDTYFVQPIT |
| | NRLTETEKQHWYPQTGYQTDVIFSFAQTGPATPKIDRS |
| | QSIQAQFKYNVKLKWGGCPAPMELITDPSLQDKFPIPNT |
| | IFKTLEIQNPETNKRTLLYDFDERHDGLTDRAAKRIKTE |
| | QIFETSFTGQLPTDPNIRIQTQETTSSSEEESEVSLKEELK |
| | LLKRKNKQLRNKLLRLTSY (SEQ ID NO: 201) |
| ORF2 | LAERARNLMYTFFTDMTHYLKTPQYNGRAMELQLMN |
| | TIIGNHDLCCGCMTPVLHIKEIINTFSYTPCPRTTGDKED |
| | QHGDKETTDALEGLEDGELDRLFAADGEDDEG (SEQ |
| | ID NO: 202) |
| ORF3 | MFGDKATKKLTPIKGKSWEAELQLAKMFKRPLRTYEE |
| | DPPYYPWVVPEPVVNFHLNFKE (SEQ ID NO: 203) |

[1666] Ring161 is an Anellovirus that was isolated from retinal tissue and/or RPE cells. In some embodiments, a method described herein comprises delivering an Anellovector (e.g., an Anellovector having sequence similarity to Ring161) to eye tissue (e.g., to the eye of a subject), for example, to retinal tissue and/or RPE cells.

TABLE N30
Novel Anellovirus nucleic acid sequence (Betatorquevirus)

| | |
|---|---|
| Name | Ring161 |
| Genus/Clade | Betatorquevirus |
| Source tissue | Retina (retinal pigment epithelium) |
| Accession | N/A |
| Full Sequence: 2967 bp | |

(SEQ ID NO: 204)
Annotations:

| Putative Domain | Base range |
|---|---|
| 5′ UTR Conserved Domain, or a portion thereof | 1-71 |
| ORF2/3 | 97-393; 2090-2488 |
| ORF2/2 | 97-393; 1963-2247 |
| ORF2 | 97-396 |
| ORF1 | 285-2267 |
| ORF3 | 2069-2488 |
| GC-rich region | 2601-2715 |
| TATA box | 2882-2886 |

TABLE A30
Novel Anellovirus amino acid sequence
(Betatorquevirus)
Ring161 (Betatorquevirus)

| | |
|---|---|
| ORF1 | MPYGWRPWRRRRRRRFWRRRARAPFRRRRYWRYRYR |
| | VRKLRTKPKKLTVKQWQPTKMRRLTVTGKYPLFEGTS |
| | ERIGNNNTQSIDTIAPYLFPSGGLFSITVFTLKGLYELHL |
| | KARNWWSISNCNLPLIKYRGCKITLYRNTDVDFVTVYT |
| | RCGSLTATEELYRSCQPSLLLLNKHKKVLTCKKNNNKR |
| | KISKTIKIPPPALMQNKWYFQKDFANYPLVMLLSAALS |
| | LDRYYTSANSISSTIGFASINTTIFQYSDFKSPNITQPYKP |
| | NDQYWLGTWTNQTVTDFTKVQVQHLILLANTNDYQP |
| | GQPLGPNKTSYKDYFKSKIKWGNPFYAPYFEPEPQKIF |
| | MITSLQKIEEAQPNAYINSLGCTLLPPEKTLLTICRYNPQ |
| | NDRSRHNALYASPVTTAKTKWGATTKPELNTEGLPLW |
| | LLSFGFHDWLLKSEKVQRLDLDYVYVILSEYITPKMEH |
| | YVPVDPNFTQGRSPFEITDHMRPPDVGYWFPKTSYQHT |
| | VFSEIINTGPGTVKLPPRISVEASMKYKFYFTLGGCPPPM |
| | DNVCDPQAQPDFPEPGNIISPTLLQDPEYPIEYYLQAFDE |
| | RRGLLTKKAAKRIKKDYETEQDIFSSTGQTAMDVQLKT |
| | PETTSTEDSSEEEKEPQTLQFQLQRHKRKQRKLRHRILQ |
| | LLKLAKDI (SEQ ID NO: 205) |
| ORF2 | MSDYYKKLTIGPRHAQLNWTNAIVTLHDLQCQCDEPL |
| | CHTIETIVNQEKSLKFSKGLSDKIKSCLTAGDHGAADVV |
| | EDFGDDELERLFAEDGTGDTDTG (SEQ ID NO: 206) |

[1667] Ring34 is an Anellovirus that was isolated from muscle tissue. In some embodiments, a method described herein comprises delivering an Anellovector (e.g., an Anellovector having sequence similarity to Ring34) to muscle tissue (e.g., to the muscle of a subject).

TABLE N31
Novel Anellovirus nucleic acid sequence (Betatorquevirus)

| | |
|---|---|
| Name | Ring34 |
| Genus/Clade | Betatorquevirus |
| Source tissue | Muscle |
| Accession | N/A |
| Full Sequence: 2984 bp | |

(SEQ ID NO: 207)
Annotations:

| Putative Domain | Base range |
|---|---|
| 5′ UTR Conserved Domain, or a portion thereof | 1-72 |
| ORF2 | 106-393 |
| ORF1 | 276-2273 |
| ORF3 | 2303-2491 |
| GC-rich region | 2668-2768 |
| Initiation element | 2930-2937 |

TABLE A31
Novel Anellovirus amino acid sequence
(Betatorquevirus)
Ring34 (Betatorquevirus)

| | |
|---|---|
| ORF1 | MPYWYRRPTYYRRRRFWRRKFRGPFRRKLWRRRRRT |
| | YRVRKTKKKLKYLHLKEWQPTRIRKLKITGIMPLYLTT |
| | HDRVSNNMEIYIDSIAPTHVPSGGGFSIQQYTLNGFYEL |
| | FTKGRCWWTQSTKDFPLIRYTGCKIDLYRSQNSDYIFN |
| | YINCYPMRANMETYQSCQPTILQLTKNHKIVRCKKDNN |
| | LKKPYKRIKIHPPAQFQNKWLFQKDMASIPLLMTRCCA |
| | TSLDRWFLASNAQSTTIGFTSLNPETFLLHNFQRPPTAG |
| | YIPRPGVYMFALTNGAHDWSQEKIGDIIYLGNSNHLQP |
| | GITMRELTQSTDTFDTVWTKYFSSSDYWGNIFLAKYLK |
| | QEVRLVVSNLSPSQLKQHYSSFDTAIGKTNFTLRTIPNLI |
| | ECRYNPLQDRGDQNEVFITSIVSDATPIQLPTDPSLKTEN |
| | LPLWLAFMGFIDFQKRQGTAQKVDVNYMVVFHTKYM |
| | SPKNLSWVIPIDNDFLNQHSEYHPDDEVTDYDRENWHP |
| | KTIFQYKTCNEIVACGPGIIKLPQNVSAEAHAKYTFYFK |
| | VGGCAADTKDIKNPEDQPKFPTPINFIQSNSLQNPETPIE |
| | NYLYSFDWRRDVLTPKAAERIAEYCLTEKPFSELTGINI |
| | FETETSPETTSTENQTTQEKEKEALQLLIQQHQLQQRDF |
| | KRRILQLLTQLT (SEQ ID NO: 208) |
| ORF2 | MSRYVPVKNSIKNRNLDWINCIVQVHNLQCSCETPLEH |
| | TVEEILHQEPNLDYKKPTKCPTGTADQLTTEEDVFGEGS |
| | LEALFAENFGEEEDAPTG (SEQ ID NO: 209) |

[1668] Ring25 is an Anellovirus that was isolated from retinal tissue and/or RPE cells. In some embodiments, a method described herein comprises delivering an Anellovector (e.g., an Anellovector having sequence similarity to Ring25) to eye tissue (e.g., to the eye of a subject), for example, to retinal tissue and/or RPE cells.

TABLE N32
Novel Anellovirus nucleic acid sequence (Betatorquevirus)

| | |
|---|---|
| Name | Ring25 |
| Genus/Clade | Betatorquevirus |
| Source tissue | Retina |
| Accession | N/A |
| Full Sequence: 2942 bp | |

(SEQ ID NO: 210)
Annotations:

| Putative Domain | Base range |
|---|---|
| 5′ UTR Conserved Domain, or a portion thereof | 1-71 |
| ORF2/3 | 109-407; 2095-2470 |
| ORF2/2 | 109-407; 1974-2250 |
| ORF2 | 109-411 |
| ORF1/1 | 282-407; 1974-2264 |
| ORF1 | 282-2264 |
| ORF1/2 | 282-407; 2095-2250 |
| ORF3 | 2078-2470 |
| GC-rich region | 2570-2703 |
| TATA box | 2856-2862 |
| Initiation element | 2876-2891 |

TABLE A32
Novel Anellovirus amino acid sequence
(Betatorquevirus)
Ring25 (Betatorquevirus)

| | |
|---|---|
| ORF1 | MPYYRRHRWQYNPYTRWRRRYWRRRPRKTFRRRYFP |
| | RRRRQRVRRKFKYLKLKEWQPKTIKKCCIKGMHPIF |
| | ITSAGSISRNYRMYEHSFTPERWPTGGGFSVTKYNL |
| | DGLYEQHSLNRNWWTTSNQTLPLVRYLGCKLKFYQS |
| | WSADYVVNWYNNFPMTATQLLYESCQPSLMMMNKNK |
| | LIVPSKLTQHRKRPYVTLRLPPPAQMSNRWFFARDL |
| | AKVGLAMLTVSCCSLDNYYIGSNQQSNNISFISLNT |
| | YFWQKHNFQQPSIRGYSPYTSGTIEKHIWFTPETTE |
| | VDKLKPTNFILLGTTKENQDGQHISQSNKNTYFTNH |
| | KFWGNPFKHDYFTGASKLYVSTKSWTEITAKMAQID |
| | TDIGAGILTEPSNPLTNICRYAPDRDTGEGNKLYLK |
| | STIRDESGWEPPTDEDLIAEGFPLWILAFGFLDWHK |
| | KLGTATNLDRSWVAVIQSNFISPQLPYYVPLDQYFY |
| | EGTSPYERTDEPHINDEDNKNWFPCTKYQQETLNNL |
| | ASCGPGIYRFGDRKTVEGKLKYQFYFKFGGCAPKMD |
| | TIRDPTKQEVYPIPNCQHSTYSLQNPSMPPESLLWQ |
| | FDVYKDILTSKATKRIGKDFSSKKTVFTDQSAMQPT |
| | ASTAAESDSSEETPDSEEEKTTLLFKYKQQRRKRKW |
| | LEHQLQQLVYQP (SEQ ID NO: 211) |
| ORF2 | MTTKSPSRRELNQLINVCCGAHDLICDCDEPTKHII |
| | LHLFSHGEPYFVTTEQKNNITKCLITDDTAGNTTHT |
| | PAGDDAIGDGDLEKLFAEDTFQEEDAKG (SEQ ID |
| | NO: 212) |

[1669] In some embodiments, an anellovector or anelloVLP as described herein is a chimeric anellovector or anelloVLP. In some embodiments, a chimeric anellovector or anelloVLP further comprises one or more elements, polypeptides, or nucleic acids from a virus other than an Anellovirus.

[1670] In some embodiments, the chimeric anellovector or anelloVLP comprises a plurality of polypeptides (e.g., Anellovirus ORF1, ORF1/1, ORF1/2, ORF2, ORF2/2, ORF2/3, and/or ORF2t/3) comprising sequences from a plurality of different Anelloviruses (e.g., as described herein).

[1671] In some embodiments, the anellovector or anelloVLP comprises a chimeric polypeptide (e.g., Anellovirus ORF1, ORF1/1, ORF1/2, ORF2, ORF2/2, ORF2/3, and/or ORF2t/3), e.g., comprising at least one portion from an Anellovirus (e.g., as described herein) and at least one portion from a different virus (e.g., as described herein).

[1672] In some embodiments, the anellovector or anelloVLP comprises a chimeric polypeptide (e.g., Anellovirus ORF1, ORF1/1, ORF1/2, ORF2, ORF2/2, ORF2/3, and/or ORF2t/3), e.g., comprising at least one portion from one Anellovirus (e.g., as described herein) and at least one portion from a different Anellovirus (e.g., as described herein). In some embodiments, the anellovector or anelloVLP comprises a chimeric ORF1 molecule comprising at least one portion of an ORF1 molecule from one Anellovirus (e.g., as described herein), or an ORF1 molecule having at least 75%, 80%, 85%, 90%, 95%, 96%, 97%, 98%, or 99% amino acid sequence identity thereto, and at least one portion of an ORF1 molecule from a different Anellovirus (e.g., as described herein), or an ORF1 molecule having at least 75%, 80%, 85%, 90%, 95%, 96%, 97%, 98%, or 99% amino acid sequence identity thereto. In some embodiments, the chimeric ORF1 molecule comprises an ORF1 structural jelly-roll domain from one Anellovirus, or a sequence having at least 75%, 80%, 85%, 90%, 95%, 96%, 97%, 98%, or 99% sequence identity thereto, and an ORF1 amino acid subsequence (e.g., as described herein) from a different Anellovirus, or a sequence having at least 75%, 80%, 85%, 90%, 95%, 96%, 97%, 98%, or 99% sequence identity thereto. In some embodiments, the chimeric ORF1 molecule comprises an ORF1 structural arginine-rich region from one Anellovirus, or a sequence having at least 75%, 80%, 85%, 90%, 95%, 96%, 97%, 98%, or 99% sequence identity thereto, and an ORF1 amino acid subsequence (e.g., as described herein) from a different Anellovirus, or a sequence having at least 75%, 80%, 85%, 90%, 95%, 96%, 97%, 98%, or 99% sequence identity thereto. In some embodiments, the chimeric ORF1 molecule comprises an ORF1 structural hypervariable domain from one Anellovirus, or a sequence having at least 75%, 80%, 85%, 90%, 95%, 96%, 97%, 98%, or 99% sequence identity thereto, and an ORF1 amino acid subsequence (e.g., as described herein) from a different Anellovirus, or a sequence having at least 75%, 80%, 85%, 90%, 95%, 96%, 97%, 98%, or 99% sequence identity thereto. In some embodiments, the chimeric ORF1 molecule comprises an ORF1 structural N22 domain from one Anellovirus, or a sequence having at least 75%, 80%, 85%, 90%, 95%, 96%, 97%, 98%, or 99% sequence identity thereto, and an ORF1 amino acid subsequence (e.g., as described herein) from a different Anellovirus, or a sequence having at least 75%, 80%, 85%, 90%, 95%, 96%, 97%, 98%, or 99% sequence identity thereto. In some embodiments, the chimeric ORF1 molecule comprises an ORF1 structural C-terminal domain from one Anellovirus, or a sequence having at least 75%, 80%, 85%, 90%, 95%, 96%, 97%, 98%, or 99% sequence identity thereto, and an ORF1 amino acid subsequence (e.g., as described herein) from a different Anellovirus, or a sequence having at least 75%, 80%, 85%, 90%, 95%, 96%, 97%, 98%, or 99% sequence identity thereto.

[1673] In some embodiments, the anellovector or anelloVLP comprises a chimeric ORF1/1 molecule comprising at least one portion of an ORF1/1 molecule from one Anellovirus (e.g., as described herein), or an ORF1/1 molecule having at least 75%, 80%, 85%, 90%, 95%, 96%, 97%, 98%, or 99% amino acid sequence identity thereto, and at least one portion of an ORF1/1 molecule from a different Anellovirus (e.g., as described herein), or an ORF1/1 molecule having at least 75%, 80%, 85%, 90%, 95%, 96%, 97%, 98%, or 99% amino acid sequence identity thereto. In some embodiments, the anellovector or anelloVLP comprises a chimeric ORF1/2 molecule comprising at least one portion of an ORF1/2 molecule from one Anellovirus (e.g., as described herein), or an ORF1/2 molecule having at least 75%, 80%, 85%, 90%, 95%, 96%, 97%, 98%, or 99% amino acid sequence identity thereto, and at least one portion of an ORF1/2 molecule from a different Anellovirus (e.g., as described herein), or an ORF1/2 molecule having at least 75%, 80%, 85%, 90%, 95%, 96%, 97%, 98%, or 99% amino acid sequence identity thereto. In some embodiments, the anellovector or anelloVLP comprises a chimeric ORF2 molecule comprising at least one portion of an ORF2 molecule from one Anellovirus (e.g., as described herein), or an ORF2 molecule having at least 75%, 80%, 85%, 90%, 95%, 96%, 97%, 98%, or 99% amino acid sequence identity thereto, and at least one portion of an ORF2 molecule from a different Anellovirus (e.g., as described herein), or an ORF2 molecule having at least 75%, 80%, 85%, 90%, 95%, 96%, 97%, 98%, or 99% amino acid sequence identity thereto. In some embodiments, the anellovector or anelloVLP comprises a chimeric ORF2/2 molecule comprising at least one portion of an ORF2/2 molecule from one Anellovirus (e.g., as described herein), or an ORF2/2 molecule having at least 75%, 80%, 85%, 90%, 95%, 96%, 97%, 98%, or 99% amino acid sequence identity thereto, and at least one portion of an ORF2/2 molecule from a different Anellovirus (e.g., as described herein), or an ORF2/2 molecule having at least 75%, 80%, 85%, 90%, 95%, 96%, 97%, 98%, or 99% amino acid sequence identity thereto. In some embodiments, the anellovector or anelloVLP comprises a chimeric ORF2/3 molecule comprising at least one portion of an ORF2/3 molecule from one Anellovirus (e.g., as described herein), or an ORF2/3 molecule having at least 75%, 80%, 85%, 90%, 95%, 96%, 97%, 98%, or 99% amino acid sequence identity thereto, and at least one portion of an ORF2/3 molecule from a different Anellovirus (e.g., as described herein), or an ORF2/3 molecule having at least 75%, 80%, 85%, 90%, 95%, 96%, 97%, 98%, or 99% amino acid sequence identity thereto. In some embodiments, the anellovector or anelloVLP comprises a chimeric ORF2T/3 molecule comprising at least one portion of an ORF2T/3 molecule from one Anellovirus (e.g., as described herein), or an ORF2T/3 molecule having at least 75%, 80%, 85%, 90%, 95%, 96%, 97%, 98%, or 99% amino acid sequence identity thereto, and at least one portion of an ORF2T/3 molecule from a different Anellovirus (e.g., as described herein), or an ORF2T/3 molecule having at least 75%, 80%, 85%, 90%, 95%, 96%, 97%, 98%, or 99% amino acid sequence identity thereto.

[1674] In some embodiments, an anellovector comprises a nucleic acid comprising a sequence listed in PCT Application No. PCT/US2018/037379, incorporated herein by reference in its entirety. In some embodiments, an anellovector or anelloVLP comprises a polypeptide comprising a sequence listed in PCT Application No. PCT/US2018/037379, incorporated herein by reference in its entirety.

[1675] In some embodiments, an anellovector comprises an Anellovirus genome, e.g., as identified according to the method described in Example 9 of PCT Publication No. WO 2020/123816, incorporated by reference herein in its entirety.

[1676] In some embodiments, an anellovector comprises a genetic element comprising a consensus Anellovirus motif, e.g., as shown in Table 19. In some embodiments, an anellovector comprises a genetic element comprising a consensus Anellovirus ORF1 motif, e.g., as shown in Table 19. In some embodiments, an anellovector comprises a genetic element comprising a consensus Anellovirus ORF1/1 motif, e.g., as shown in Table 19. In some embodiments, an anellovector comprises a genetic element comprising a consensus Anellovirus ORF1/2 motif, e.g., as shown in Table 19. In some embodiments, an anellovector comprises a genetic element comprising a consensus Anellovirus ORF2/2 motif, e.g., as shown in Table 19. In some embodiments, an anellovector comprises a genetic element comprising a consensus Anellovirus ORF2/3 motif, e.g., as shown in Table 19. In some embodiments, an anellovector comprises a genetic element comprising a consensus Anellovirus ORF2t/3 motif, e.g., as shown in Table 19. In some embodiments, X, as shown in Table 19, indicates any amino acid. In some embodiments, Z, as shown in Table 19, indicates glutamic acid or glutamine. In some embodiments, B, as shown in Table 19, indicates aspartic acid or asparagine. In some embodiments, J, as shown in Table 19, indicates leucine or isoleucine.

TABLE 19
Consensus motifs in open reading frames
(ORFs) of Anelloviruses

| Con- | | | | |
|---|---|---|---|---|
| sensus | Open | | | SEQ |
| Thresh- | Reading | | | ID |
| old | Frame | Position | Motif | NO: |
| 50 | ORF1 | 79 | LIJRQWQPXXIRRCXIXG | 68 |
| | | | YXPLIXC | |
| 50 | ORF1 | 111 | NYXXHXD | 69 |
| 50 | ORF1 | 135 | FSLXXLYDZ | 70 |
| 50 | ORF1 | 149 | NXWTXSNXDLDLCRYXGC | 71 |
| 50 | ORF1 | 194 | TXPSXHPGXMXLXKHK | 72 |
| 50 | ORF1 | 212 | IPSLXTRPXG | 73 |
| 50 | ORF1 | 228 | RIXPPXLFXDKWYFQXDL | 74 |
| 50 | ORF1 | 250 | LLXIXATA | 75 |
| 50 | ORF1 | 260 | LXXPFXSPXTD | 76 |
| 50 | ORF1 | 448 | YNPXXDKGXGNXIW | 77 |
| 50 | ORF1 | 519 | CPYTZPXL | 78 |
| 50 | ORF1 | 542 | XFGXGXMP | 79 |
| 50 | ORF1 | 569 | HQXEVXEX | 80 |
| 50 | ORF1 | 600 | KYXFXFXWGGNP | 81 |
| 50 | ORF1 | 653 | HSWDXRRG | 82 |
| 50 | ORF1 | 666 | AIKRXQQ | 83 |
| 50 | ORF1 | 750 | XQZQXXLR | 84 |
| 50 | ORF1/1 | 73 | PRXJQXXDP | 85 |
| 50 | ORF1/1 | 91 | HSWDXRRG | 86 |
| 50 | ORF1/1 | 105 | AIKRXQQ | 87 |
| 50 | ORF1/1 | 187 | QZQXXLR | 88 |
| 50 | ORF1/2 | 97 | KXKRRRR | 89 |
| 50 | ORF2/2 | 158 | PIXSLXXYKXXTR | 90 |
| 50 | ORF2/2 | 189 | LAXQLLKECXKN | 91 |
| 50 | ORF2/3 | 39 | HLNXLA | 92 |
| 50 | ORF2/3 | 272 | DRPPR | 93 |
| 50 | ORF2/3 | 281 | DXPFYPWXP | 94 |
| 50 | ORF2/3 | 300 | VXFKLXF | 95 |
| 50 | ORF2t/3 | 4 | WXPPVHBVXGIERXW | 96 |
| 50 | ORF2t/3 | 37 | AKRKLX | 97 |
| 50 | ORF2t/3 | 140 | PSSXDWXXEY | 98 |
| 50 | ORF2t/3 | 156 | DRPPR | 99 |
| 50 | ORF2t/3 | 167 | PFYPW | 2772 |
| 50 | ORF2t/3 | 183 | NVXFKLXF | 101 |
| 50 | ORF1 | 84 | JXXXXWQPXXXXXCXIXG | 102 |
| | | | XXXJWQP | |
| 50 | ORF1 | 149 | NXWXXXNXXXXLXRY | 103 |
| 50 | ORF1 | 448 | YNPXXDXG | 104 |

### ORF1 Molecules

[1677] In some embodiments, the anellovector or anelloVLP comprises an ORF1 molecule and/or a nucleic acid encoding an ORF1 molecule. Generally, an ORF1 molecule comprises a polypeptide having the structural features and/or activity of an Anellovirus ORF1 protein (e.g., an Anellovirus ORF1 protein as described herein, e.g., as listed in Table A1-A32), or a functional fragment thereof. In some embodiments, the ORF1 molecule comprises a truncation relative to an Anellovirus ORF1 protein (e.g., an Anellovirus ORF1 protein as described herein, e.g., as listed in Table A1-A32). In some embodiments, the ORF1 molecule is truncated by at least 10, 20, 30, 40, 50, 60, 70, 80, 90, 100, 150, 200, 250, 300, 350, 400, 450, 500, 550, 600, 650, or 700 amino acids of the Anellovirus ORF1 protein. In some embodiments, an ORF1 molecule comprises an amino acid sequence having at least 70%, 75%, 80%, 85%, 90%, 95%, 96%, 97%, 98%, 99%, or 100% sequence identity to an Anellovirus ORF1 protein sequence as shown in Table A1-A32. In some embodiments, an ORF1 molecule comprises an amino acid sequence having at least 75%, 80%, 85%, 90%, 95%, 96%, 97%, 98%, or 99% sequence identity to an Betatorquevirus ORF1 protein, e.g., as described herein. An ORF1 molecule can generally bind to a nucleic acid molecule, such as DNA (e.g., a genetic element, e.g., as described herein). In some embodiments, an ORF1 molecule localizes to the nucleus of a cell. In certain embodiments, an ORF1 molecule localizes to the nucleolus of a cell. In some embodiments, an ORF1 molecule is encoded by an ORF1 nucleic acid. In some embodiments, the ORF1 nucleic acid comprises an antisense strand, which can be directly transcribed to produce mRNA encoding the ORF1 molecule. In some embodiments, the ORF1 nucleic acid comprises a sense strand.

[1678] In some embodiments, an ORF1 molecule as described herein comprises an amino acid sequence (e.g., an ORF1 sequence, or an arginine-rich region, jelly-roll domain, HVR, N22, or C-terminal domain sequence) as listed in any of Tables A2, A4, A6, A8, A10, A12, C1-C5, 2, 4, 6, 8, 10, 12, 14, 16, 18, 20-37, or D1-D10 of PCT Publication No. WO2020/123816 (incorporated herein by reference in its entirety), or a sequence having at least 70% 80%, 85%, 90% 95%, 96%, 97%, 98% and 99% nucleotide sequence identity thereto.

[1679] Without wishing to be bound by theory, an ORF1 molecule may be capable of binding to other ORF1 molecules, e.g., to form a proteinaceous exterior (e.g., as described herein). Such an ORF1 molecule may be described as having the capacity to form a capsid. In some embodiments, the proteinaceous exterior may encapsidate a nucleic acid molecule (e.g., a genetic element as described herein). In some embodiments, a plurality of ORF1 molecules may form a multimer, e.g., to produce a proteinaceous exterior. In some embodiments, the multimer may be a homomultimer. In other embodiments, the multimer may be a heteromultimer (e.g., comprising a plurality of distinct ORF1 molecules). It is also contemplated that an ORF1 molecule may have replicase activity.

### Anellovirus ORF1 Molecule Domain Structures

[1680] Previously, Anellovirus ORF1 molecules have been described as having the following domains, from N-terminus to C-terminus: arginine rich region, jelly-roll region, hypervariable region (HVR), N22 domain, C-terminal domain (CTD). This disclosure, for instance in Examples 17-25 herein, describes the structural analysis that leads to a refined domain structure for Anellovirus ORF1. In particular, domains P1 and P2 have been identified, overlapping with the regions previously referred to as the HVR and N22 domain. In addition, this work has refined the boundaries of the previous domain structures. These refined domain structures are referred to herein as the structural arginine-rich region, the structural jelly-roll region, the structural HVR, the structural N22 domain, and the structural CTD.

### Structural ORF1 Domain-Based Nomenclature for Anellovirus ORF1 Molecules

[1681] In an aspect, the present disclosure provides an ORF1 molecule comprising one or more (e.g., 1, 2, 3, 4, or 5) of domains or domain fragments of an Anellovirus ORF1 protein, wherein the boundaries of the domains are defined based on the refined domain structures obtained via the structural analysis described herein, e.g., in Example 17-25. An ORF1 molecule may include, for example, one or more (e.g., 1, 2, 3, 4, or 5) of (e.g., in an N-terminal to C-terminal direction): a structural arginine-rich region, a structural jelly-roll region, a structural hypervariable region (HVR), a structural N22 domain, and a structural C-terminal domain (e.g., as described herein). In some embodiments, the ORF1 molecule comprises a structural arginine-rich region (e.g., as described herein), or an amino acid sequence having at least 75%, 80%, 85%, 90%, 95%, 96%, 97%, 98%, or 99% sequence identity thereto. In some embodiments, the ORF1 molecule comprises a structural jelly-roll region (e.g., as described herein), or an amino acid sequence having at least 75%, 80%, 85%, 90%, 95%, 96%, 97%, 98%, or 99% sequence identity thereto. In some embodiments, the ORF1 molecule comprises a structural hypervariable region (e.g., as described herein), or an amino acid sequence having at least 75%, 80%, 85%, 90%, 95%, 96%, 97%, 98%, or 99% sequence identity thereto. In some embodiments, the ORF1 molecule comprises a structural N22 domain (e.g., as described herein), or an amino acid sequence having at least 75%, 80%, 85%, 90%, 95%, 96%, 97%, 98%, or 99% sequence identity thereto. In some embodiments, the ORF1 molecule comprises a structural C-terminal domain (e.g., as described herein), or an amino acid sequence having at least 75%, 80%, 85%, 90%, 95%, 96%, 97%, 98%, or 99% sequence identity thereto.

### P1/P2 Domain-Based Nomenclature for Anellovirus ORF1 Moelcules

[1682] In an aspect, the present disclosure provides an ORF1 molecule comprising one or more (e.g., 1, 2, 3, 4, 5, 6, or 7) domains or domain fragments of an Anellovirus ORF1 protein, wherein the boundaries of the domains are defined based on the structural analysis identifying the P1 and P2 domains of Anellovirus ORF1 proteins (e.g., as described herein, e.g., in Examples 17-25). An ORF1 molecule may include, for example, one or more (e.g., 1, 2, 3, 4, 5, 6, or 7) of (e.g., in an N-terminal to C-terminal direction): a structural arginine-rich region, a jelly-roll B—H strands subdomain, a first P1 domain fragment (e.g., a P1-1 subdomain), a P2 domain, a second P1 domain fragment (e.g., a P1-2 subdomain), a jelly-roll I-strand subdomain, and a structural C-terminal domain (e.g., as described herein). In some embodiments, the ORF1 molecule comprises a structural arginine-rich region (e.g., as described herein), or an amino acid sequence having at least 75%, 80%, 85%, 90%, 95%, 96%, 97%, 98%, or 99% sequence identity thereto. In some embodiments, the ORF1 molecule comprises a jelly-roll B—H strands subdomain (e.g., as described herein), or an amino acid sequence having at least 75%, 80%, 85%, 90%, 95%, 96%, 97%, 98%, or 99% sequence identity thereto. In some embodiments, the ORF1 molecule comprises a P1-1 region (e.g., as described herein), or an amino acid sequence having at least 75%, 80%, 85%, 90%, 95%, 96%, 97%, 98%, or 99% sequence identity thereto. In some embodiments, the ORF1 molecule comprises a P2 domain (e.g., as described herein), or an amino acid sequence having at least 75%, 80%, 85%, 90%, 95%, 96%, 97%, 98%, or 99% sequence identity thereto. In some embodiments, the ORF1 molecule comprises a P1-2 region (e.g., as described herein), or an amino acid sequence having at least 75%, 80%, 85%, 90%, 95%, 96%, 97%, 98%, or 99% sequence identity thereto. In some embodiments, the ORF1 molecule comprises a jelly-roll I strand subdomain (e.g., as described herein), or an amino acid sequence having at least 75%, 80%, 85%, 90%, 95%, 96%, 97%, 98%, or 99% sequence identity thereto. In some embodiments, the ORF1 molecule comprises a structural C-terminal domain (e.g., as described herein), or an amino acid sequence having at least 75%, 80%, 85%, 90%, 95%, 96%, 97%, 98%, or 99% sequence identity thereto.

### Structural Arginine-Rich Region

[1683] An ORF1 molecule may, in some embodiments, also include a region comprising the structure or activity of an Anellovirus structural arginine-rich region (e.g., as described herein, e.g., a structural arginine-rich region from an Anellovirus ORF1 protein as described herein). In some embodiments, the region comprises the amino acid sequence of a structural arginine-rich region as described herein, or a sequence having at least 70%, 75% 80%, 85%, 90% 95%, 96%, 97%, 98% and 99% amino acid sequence identity thereto.

[1684] A structural arginine rich region generally has at least 70% (e.g., at least about 70, 80, 90, 95, 96, 97, 98, 99, or 100%) sequence identity to a structural arginine-rich region sequence described herein or a sequence of at least about 40 amino acids comprising at least 60%, 70%, or 80% basic residues (e.g., arginine, lysine, or a combination thereof). In some embodiments, an ORF1 molecule as described herein does not comprise a full-length structural arginine-rich region (e.g., as described herein). In some embodiments, an ORF1 molecule as described herein comprises a portion of a structural arginine-rich region, e.g., a C-terminal portion of a structural arginine-rich region (e.g., as described herein). In some embodiments, an ORF1 molecule as described herein does not any substantial portion (e.g., a portion consisting of at least 5, 10, 15, 20, 25, 30, 35, 40, 45, or 50 contiguous amino acids) of a structural arginine-rich region (e.g., as described herein). In some embodiments, the structural arginine-rich region of an ORF1 molecule is replaced by a heterologous sequence, e.g., a sequence from another virus (e.g., a different Anellovirus or a virus other than an Anellovirus, e.g., as described herein), e.g., as described herein.

[1685] In some embodiments, the first region of an ORF1 molecule as described herein comprises a structural arginine-rich region. In other embodiments, an ORF1 molecule as described herein does not comprise a structural arginine-rich region or only comprises a portion of a structural arginine-rich region.

### Structural Jelly Roll Region

[1686] An ORF1 molecule may, in some embodiments, also include a region comprising the structure or activity of an Anellovirus structural jelly-roll domain or region (e.g., as described herein, e.g., a structural jelly-roll domain or region from an Anellovirus ORF1 protein as described herein). In some embodiments, the region comprises the amino acid sequence of a structural jelly-roll region as described herein, or a sequence having at least 70%, 75% 80%, 85%, 90% 95%, 96%, 97%, 98% and 99% amino acid sequence identity thereto.

[1687] In some embodiments, a structural jelly-roll domain or region comprises (e.g., consists of) a polypeptide (e.g., a domain or region comprised in a larger polypeptide) comprising one or more (e.g., 1, 2, or 3) of the following characteristics:
[1688] (i) at least 30% (e.g., at least 30%, 35%, 40%, 45%, 50%, 55%, 60%, 65%, 70%, 75%, 80%, 90%, or more) of the amino acids of the structural jelly-roll domain are part of one or more β-sheets;
[1689] (ii) the secondary structure of the structural jelly-roll domain comprises at least four (e.g., at least 4, 5, 6, 7, 8, 9, 10, 11, or 12) β-strands; and/or
[1690] (iii) the tertiary structure of the structural jelly-roll domain comprises at least two (e.g., at least 2, 3, or 4) β-sheets; and/or
[1691] (iv) the structural jelly-roll domain comprises a ratio of β-sheets to α-helices of at least 2:1, 3:1, 4:1, 5:1, 6:1, 7:1, 8:1, 9:1, or 10:1.

[1692] In certain embodiments, a structural jelly-roll domain comprises two β-sheets.

[1693] In certain embodiments, one or more (e.g., 1, 2, 3, 4, 5, 6, 7, 8, 9, or 10) of the β-sheets comprises about eight (e.g., 4, 5, 6, 7, 8, 9, 10, 11, or 12) β-strands. In certain embodiments, one or more (e.g., 1, 2, 3, 4, 5, 6, 7, 8, 9, or 10) of the β-sheets comprises eight β-strands. In certain embodiments, one or more (e.g., 1, 2, 3, 4, 5, 6, 7, 8, 9, or 10) of the β-sheets comprises seven β-strands. In certain embodiments, one or more (e.g., 1, 2, 3, 4, 5, 6, 7, 8, 9, or 10) of the β-sheets comprises six β-strands. In certain embodiments, one or more (e.g., 1, 2, 3, 4, 5, 6, 7, 8, 9, or 10) of the β-sheets comprises five β-strands. In certain embodiments, one or more (e.g., 1, 2, 3, 4, 5, 6, 7, 8, 9, or 10) of the β-sheets comprises four β-strands.

[1694] In some embodiments, the structural jelly-roll domain comprises a first β-sheet in antiparallel orientation to a second β-sheet. In certain embodiments, the first β-sheet comprises about four (e.g., 3, 4, 5, or 6) β-strands. In certain embodiments, the second β-sheet comprises about four (e.g., 3, 4, 5, or 6) 0-strands. In embodiments, the first and second β-sheet comprise, in total, about eight (e.g., 6, 7, 8, 9, 10, 11, or 12) β-strands.

[1695] In certain embodiments, a structural jelly-roll domain is a component of a capsid protein (e.g., an ORF1 molecule as described herein). In certain embodiments, a structural jelly-roll domain has self-assembly activity. In some embodiments, a polypeptide comprising a structural jelly-roll domain binds to another copy of the polypeptide comprising the structural jelly-roll domain. In some embodiments, a structural jelly-roll domain of a first polypeptide binds to a structural jelly-roll domain of a second copy of the polypeptide.

[1696] In some embodiments, an ORF1 molecule as described herein does not comprise a full-length structural jelly-roll region (e.g., as described herein). In some embodiments, an ORF1 molecule as described herein comprises a portion of a structural jelly-roll region, e.g., an N-terminal portion of a structural jelly-roll region (e.g., as described herein). In some embodiments, an ORF1 molecule as described herein does not comprise any substantial portion (e.g., a portion consisting of at least 5, 10, 15, 20, 25, 30, 35, 40, 45, or 50 contiguous amino acids) of a structural jelly-roll region (e.g., as described herein). In some embodiments, the structural jelly-roll region of an ORF1 molecule is replaced by a heterologous sequence, e.g., a sequence from another virus (e.g., a different Anellovirus or a virus other than an Anellovirus, e.g., as described herein), e.g., as described herein.

[1697] In some embodiments, the second region of an ORF1 molecule as described herein comprises a structural jelly-roll region.

### Jelly-Roll B—H Strands Subdomain

[1698] Structural analysis described herein revealed that the beta strands of the jelly-roll region are in noncontiguous portions of the ORF1 molecule. In particular, a first jelly-roll subdomain comprises beta strands B—H and a second jelly-roll subdomain comprises beta strand I. An ORF1 molecule may thus, in some embodiments, also include a region comprising the structure or activity of the region of an Anellovirus ORF1 protein comprising beta strands B—H of the jelly-roll domain or region (e.g., as described herein). In some embodiments, the region comprises the amino acid sequence of a first portion of a jelly-roll region (e.g., a jelly-roll (B—H) sequence as described herein), or a sequence having at least 70%, 75% 80%, 85%, 90% 95%, 96%, 97%, 98% and 99% amino acid sequence identity thereto.

[1699] In some embodiments, the first portion of the jelly-roll domain or region may comprise one or more (e.g., 1, 2, or 3) of the following characteristics:
[1700] (i) at least 30% (e.g., at least 30%, 35%, 40%, 45%, 50%, 55%, 60%, 65%, 70%, 75%, 80%, 90%, or more) of the amino acids of the jelly-roll domain are part of one or more β-sheets;
[1701] (ii) the secondary structure of the jelly-roll domain comprises at least four (e.g., at least 4, 5, 6, 7, 8, 9, 10, 11, or 12) β-strands; and/or
[1702] (iii) the tertiary structure of the jelly-roll domain comprises at least two (e.g., at least 2, 3, or 4) (3-sheets; and/or
[1703] (iv) the jelly-roll domain comprises a ratio of β-sheets to α-helices of at least 2:1, 3:1, 4:1, 5:1, 6:1, 7:1, 8:1, 9:1, or 10:1.

[1704] In certain embodiments, a jelly-roll domain comprises two β-sheets.

[1705] In certain embodiments, one or more (e.g., 1, 2, 3, 4, 5, 6, 7, 8, 9, or 10) of the β-sheets comprises about eight (e.g., 4, 5, 6, 7, 8, 9, 10, 11, or 12) β-strands. In certain embodiments, one or more (e.g., 1, 2, 3, 4, 5, 6, 7, 8, 9, or 10) of the β-sheets comprises eight β-strands. In certain embodiments, one or more (e.g., 1, 2, 3, 4, 5, 6, 7, 8, 9, or 10) of the β-sheets comprises seven β-strands. In certain embodiments, one or more (e.g., 1, 2, 3, 4, 5, 6, 7, 8, 9, or 10) of the β-sheets comprises six β-strands. In certain embodiments, one or more (e.g., 1, 2, 3, 4, 5, 6, 7, 8, 9, or 10) of the β-sheets comprises five β-strands. In certain embodiments, one or more (e.g., 1, 2, 3, 4, 5, 6, 7, 8, 9, or 10) of the β-sheets comprises four β-strands.

[1706] In some embodiments, the first portion of the jelly-roll domain comprises a first R-sheet in antiparallel orientation to a second β-sheet. In certain embodiments, the first R-sheet comprises about four (e.g., 3, 4, 5, or 6) β-strands. In certain embodiments, the second R-sheet comprises about four (e.g., 3, 4, 5, or 6) β-strands. In embodiments, the first and second R-sheet comprise, in total, about eight (e.g., 6, 7, 8, 9, 10, 11, or 12) β-strands.

[1707] In certain embodiments, the jelly-roll B—H strands subdomain is a component of a capsid protein (e.g., an ORF1 molecule as described herein). In certain embodiments, a jelly-roll B—H strands subdomain has self-assembly activity. In some embodiments, a polypeptide comprising a jelly-roll B—H strands subdomain binds to another copy of the polypeptide comprising the jelly-roll B—H strands subdomain. In some embodiments, the jelly-roll B—H strands subdomain of a first polypeptide binds to a jelly-roll B—H strands subdomain of a second copy of the polypeptide.

[1708] In some embodiments, an ORF1 molecule as described herein does not comprise a full-length jelly-roll B—H strands subdomain (e.g., as described herein). In some embodiments, an ORF1 molecule as described herein comprises a portion of a jelly-roll B—H strands subdomain, e.g., an N-terminal portion of a jelly-roll B—H strands subdomain (e.g., as described herein). In some embodiments, an ORF1 molecule as described herein does not comprise any substantial portion (e.g., a portion consisting of at least 5, 10, 15, 20, 25, 30, 35, 40, 45, or 50 contiguous amino acids) of a jelly-roll B—H strands subdomain (e.g., as described herein). In some embodiments, the jelly-roll B—H strands subdomain of an ORF1 molecule is replaced by a heterologous sequence, e.g., a sequence from another virus (e.g., a different Anellovirus or a virus other than an Anellovirus, e.g., as described herein), e.g., as described herein.

[1709] In some embodiments, the second region of an ORF1 molecule as described herein comprises a jelly-roll B—H strands subdomain.

### Structural N22 Domain (Structural N22 Domain-Based Nomenclature)

[1710] An ORF1 molecule may, in some embodiments, also include a region comprising the structure or activity of an Anellovirus structural N22 domain (e.g., as described herein, e.g., an structural N22 domain from an Anellovirus ORF1 protein as described herein). In some embodiments, the region comprises the amino acid sequence of a structural N22 domain as described herein, or a sequence having at least 70%, 75% 80%, 85%, 90% 95%, 96%, 97%, 98% and 99% amino acid sequence identity thereto.

[1711] In some embodiments, the third region of an ORF1 molecule as described herein comprises a structural N22 domain.

### Structural Hypervariable Region (HVR)

[1712] An ORF1 molecule may, in some embodiments, further comprise a hypervariable region (HVR), e.g., an HVR from an Anellovirus ORF1 protein, e.g., as described herein. In some embodiments, the region comprises the amino acid sequence of a structural HVR as described herein, or a sequence having at least 70%, 75% 80%, 85%, 90% 95%, 96%, 97%, 98% and 99% amino acid sequence identity thereto. In some embodiments, the HVR is positioned between the second region and the third region. In some embodiments, the HVR comprises comprises at least about 55 (e.g., at least about 45, 50, 51, 52, 53, 54, 55, 56, 57, 58, 59, 60, or 65) amino acids (e.g., about 45-160, 50-160, 55-160, 60-160, 45-150, 50-150, 55-150, 60-150, 45-140, 50-140, 55-140, or 60-140 amino acids).

### P1-1 Subdomain

[1713] In some embodiments, an ORF1 molecule comprises a P1 domain. A P1 domain is generally noncontiguous and comprises a P1-1 subdomain and a P1-2 subdomain, which may be separated by a P2 domain. An ORF1 molecule may, in some embodiments, include a region comprising the structure or activity of a first portion of an Anellovirus ORF1 P1 domain, e.g., an Anellovirus ORF1 P1-1 domain (e.g., as described herein, e.g., a P1-1 domain from an Anellovirus ORF1 protein as described herein). In some embodiments, the region comprises the amino acid sequence of a P1-1 domain as described herein, or a sequence having at least 70%, 75% 80%, 85%, 90% 95%, 96%, 97%, 98% and 99% amino acid sequence identity thereto.

[1714] In some embodiments, the third region of an ORF1 molecule as described herein comprises a P1-1 domain.

### P2 Domain

[1715] An ORF1 molecule may, in some embodiments, also include a region comprising the structure or activity of an Anellovirus ORF1 P2 domain (e.g., as described herein, e.g., a P2 domain from an Anellovirus ORF1 protein as described herein). In some embodiments, the region comprises the amino acid sequence of a P2 domain as described herein, or a sequence having at least 70%, 75% 80%, 85%, 90% 95%, 96%, 97%, 98% and 99% amino acid sequence identity thereto.

[1716] In some embodiments, the fourth region of an ORF1 molecule as described herein comprises a P2 domain.

### P1-2 Subdomain

[1717] An ORF1 molecule may, in some embodiments, also include a region comprising the structure or activity of a second portion of an Anellovirus ORF1 P1 domain, e.g., an Anellovirus ORF1 P1-2 domain (e.g., as described herein, e.g., a P1-2 domain from an Anellovirus ORF1 protein as described herein). In some embodiments, the region comprises the amino acid sequence of a P1-2 domain as described herein, or a sequence having at least 70%, 75% 80%, 85%, 90% 95%, 96%, 97%, 98% and 99% amino acid sequence identity thereto.

[1718] In some embodiments, the fifth region of an ORF1 molecule as described herein comprises a P1-2 domain.

### Jelly-Roll I-Strand Subdomain

[1719] An ORF1 molecule may, in some embodiments, also include a region comprising the structure or activity of a second portion of an Anellovirus ORF1 jelly-roll domain, e.g., an Anellovirus ORF1 jelly-roll strand I subdomain (e.g., as described herein, e.g., a jelly-roll strand I subdomain from an Anellovirus ORF1 protein as described herein). In some embodiments, the region comprises the amino acid sequence of a jelly-roll strand I subdomain as described herein, or a sequence having at least 70%, 75% 80%, 85%, 90% 95%, 96%, 97%, 98% and 99% amino acid sequence identity thereto.

[1720] In some embodiments, the sixth region of an ORF1 molecule as described herein comprises a jelly-roll strand I subdomain.

### Structural C-Terminal Domain

[1721] An ORF1 molecule may also include a region comprising the structure or activity of an Anellovirus structural C-terminal domain (CTD) (e.g., as described herein, e.g., a structural CTD from an Anellovirus ORF1 protein as described herein). In some embodiments, the region comprises the amino acid sequence of a structural C-terminal domain as described herein, or a sequence having at least 70%, 75% 80%, 85%, 90% 95%, 96%, 97%, 98% and 99% amino acid sequence identity thereto. In some embodiments, an ORF1 molecule as described herein does not comprise a full-length structural C-terminal domain (e.g., as described herein). In some embodiments, an ORF1 molecule as described herein comprises a portion of a structural C-terminal domain, e.g., an N-terminal portion of a structural C-terminal domain (e.g., as described herein). In some embodiments, an ORF1 molecule as described herein does not comprise any substantial portion (e.g., a portion consisting of at least 5, 10, 15, 20, 25, 30, 35, 40, 45, or 50 contiguous amino acids) of a structural C-terminal domain (e.g., as described herein). In some embodiments, the structural C-terminal domain of an ORF1 molecule is replaced by a heterologous sequence, e.g., a sequence from another virus (e.g., a different Anellovirus or a virus other than an Anellovirus, e.g., as described herein), e.g., as described herein.

[1722] In some embodiments, the fourth region of an ORF1 molecule as described herein comprises a structural C-terminal domain. In other embodiments, the seventh region of an ORF1 molecule as described herein comprises a structural C-terminal domain.

### ORF1 Molecule Structures

[1723] In some embodiments, the ORF1 molecule comprises, in N-terminal to C-terminal order, a first region (e.g., comprising a structural arginine-rich region), second region (e.g., comprising a structural jelly-roll region), third region (e.g., comprising a structural N22 domain), and fourth region (e.g., comprising a structural C-terminal domain). In certain embodiments, the ORF1 molecule comprises a structural HVR (e.g., between the third and fourth regions).

[1724] In some embodiments, the first region can bind to a nucleic acid molecule (e.g., DNA). In some embodiments, the basic residues are selected from arginine, histidine, or lysine, or a combination thereof. In some embodiments, the first region comprises at least 60%, 65%, 70%, 75%, 80%, 85%, 90%, 95%, or 100% arginine residues (e.g., between 60%-90%, 60%-80%, 70%-90%, or 70-80% arginine residues). In some embodiments, the first region comprises about 30-120 amino acids (e.g., about 40-120, 40-100, 40-90, 40-80, 40-70, 50-100, 50-90, 50-80, 50-70, 60-100, 60-90, or 60-80 amino acids). In some embodiments, the first region comprises the structure or activity of a viral ORF1 structural arginine-rich region (e.g., a structural arginine-rich region from an Anellovirus ORF1 protein, e.g., as described herein). In some embodiments, the first region comprises a nuclear localization sigal.

[1725] In some embodiments, the second region comprises a structural jelly-roll domain, e.g., the structure or activity of a viral ORF1 structural jelly-roll domain (e.g., a structural jelly-roll domain from an Anellovirus ORF1 protein, e.g., as described herein). In some embodiments, the second region is capable of binding to the second region of another ORF1 molecule, e.g., to form a proteinaceous exterior (e.g., capsid) or a portion thereof.

[1726] In some embodiments, at least a portion of the fourth region is exposed on the surface of a proteinaceous exterior (e.g., a proteinaceous exterior comprising a multimer of ORF1 molecules, e.g., as described herein).

[1727] In some embodiments, the first region, second region, third region, fourth region, and/or HVR each comprise fewer than four (e.g., 0, 1, 2, or 3) beta sheets.

[1728] In some embodiments, the ORF1 molecule comprises, in N-terminal to C-terminal order, a first region (e.g., comprising a structural arginine-rich region), second region (e.g., comprising a jelly-roll B—H strands subdomain), third region (e.g., comprising a first portion of a P1 domain), fourth region (e.g., comprising a P2 domain), fifth region (e.g., comprising a second portion of a P1 domain), sixth region (e.g., comprising a jelly-roll strand I subdomain), and seventh region (e.g., comprising a structural C-terminal domain).

[1729] In some embodiments, the first region can bind to a nucleic acid molecule (e.g., DNA). In some embodiments, the basic residues are selected from arginine, histidine, or lysine, or a combination thereof. In some embodiments, the first region comprises at least 60%, 65%, 70%, 75%, 80%, 85%, 90%, 95%, or 100% arginine residues (e.g., between 60%-90%, 60%-80%, 70%-90%, or 70-80% arginine residues). In some embodiments, the first region comprises about 30-120 amino acids (e.g., about 40-120, 40-100, 40-90, 40-80, 40-70, 50-100, 50-90, 50-80, 50-70, 60-100, 60-90, or 60-80 amino acids). In some embodiments, the first region comprises the structure or activity of a viral ORF1 structural arginine-rich region (e.g., a structural arginine-rich region from an Anellovirus ORF1 protein, e.g., as described herein). In some embodiments, the first region comprises a nuclear localization sigal.

[1730] In some embodiments, at least a portion of the seventh region is exposed on the surface of a proteinaceous exterior (e.g., a proteinaceous exterior comprising a multimer of ORF1 molecules, e.g., as described herein).

[1731] In some embodiments, one or more of the domains or regions of an ORF1 molecule may be replaced by a heterologous amino acid sequence (e.g., the corresponding region from a heterologous ORF1 molecule). In some embodiments, the heterologous amino acid sequence has a desired functionality, e.g., as described herein.

[1732] In some embodiments, the ORF1 molecule comprises a plurality of conserved motifs (e.g., motifs comprising about 5, 6, 7, 8, 9, 10, 11, 12, 13, 14, 15, 16, 17, 18, 19, 20, 25, 30, 35, 40, 45, 50, 60, 70, 80, 90, 100, or more amino acids) (e.g., as shown in FIG. 34 of PCT Publication No. WO2020/123816). In some embodiments, the conserved motifs may show 60, 70, 80, 85, 90, 95, or 100% sequence identity to an ORF1 protein of one or more wild-type Anellovirus clades (e.g., Betatorquevirus). In some embodiments, the conserved motifs each have a length between 1-1000 (e.g., between 5-10, 5-15, 5-20, 10-15, 10-20, 15-20, 5-50, 5-100, 10-50, 10-100, 10-1000, 50-100, 50-1000, or 100-1000) amino acids. In certain embodiments, the conserved motifs consist of about 2-4% (e.g., about 1-8%, 1-6%, 1-5%, 1-4%, 2-8%, 2-6%, 2-5%, or 2-4%) of the sequence of the ORF1 molecule, and each show 100% sequence identity to the corresponding motifs in an ORF1 protein of the wild-type Anellovirus clade. In certain embodiments, the conserved motifs consist of about 5-10% (e.g., about 1-20%, 1-10%, 5-20%, or 5-10%) of the sequence of the ORF1 molecule, and each show 80% sequence identity to the corresponding motifs in an ORF1 protein of the wild-type Anellovirus clade. In certain embodiments, the conserved motifs consist of about 10-50% (e.g., about 10-20%, 10-30%, 10-40%, 10-50%, 20-40%, 20-50%, or 30-50%) of the sequence of the ORF1 molecule, and each show 60% sequence identity to the corresponding motifs in an ORF1 protein of the wild-type Anellovirus clade. In some embodiments, the conserved motifs comprise one or more amino acid sequences as listed in Table 19.

[1733] In some embodiments, an ORF1 molecule comprises at least one difference (e.g., a mutation, chemical modification, or epigenetic alteration) relative to a wild-type ORF1 protein, e.g., as described herein (e.g., as shown in Table A1-A32).

### Conserved ORF1 Motif in Structural N22 Domain

[1734] In some embodiments, a polypeptide (e.g., an ORF1 molecule) described herein comprises the amino acid sequence YNPX²DXGX²N (SEQ ID NO: 829), wherein Xⁿ is a contiguous sequence of any n amino acids. For example, X² indicates a contiguous sequence of any two amino acids. In some embodiments, the YNPX²DXGX²N (SEQ ID NO: 829) is comprised within the structural N22 domain of an ORF1 molecule, e.g., as described herein. In some embodiments, a genetic element described herein comprises a nucleic acid sequence (e.g., a nucleic acid sequence encoding an ORF1 molecule, e.g., as described herein) encoding the amino acid sequence YNPX²DXGX²N (SEQ ID NO: 829), wherein Xⁿ is a contiguous sequence of any n amino acids.

[1735] In some embodiments, a polypeptide (e.g., an ORF1 molecule) comprises a conserved secondary structure, e.g., flanking and/or comprising a portion of the YNPX²DXGX²N (SEQ ID NO: 829) motif, e.g., in an structural N22 domain. In some embodiments, the conserved secondary structure comprises a first beta strand and/or a second beta strand. In some embodiments, the first beta strand is about 5-6 (e.g., 3, 4, 5, 6, 7, or 8) amino acids in length. In some embodiments, the first beta strand comprises the tyrosine (Y) residue at the N-terminal end of the YNPX²DXGX²N (SEQ ID NO: 829) motif. In some embodiments, the YNPX²DXGX²N (SEQ ID NO: 829) motif comprises a random coil (e.g., about 8-9 amino acids of random coil). In some embodiments, the second beta strand is about 7-8 (e.g., 5, 6, 7, 8, 9, or 10) amino acids in length. In some embodiments, the second beta strand comprises the asparagine (N) residue at the C-terminal end of the YNPX²DXGX²N (SEQ ID NO: 829) motif.

[1736] Exemplary YNPX²DXGX²N (SEQ ID NO: 829) motif-flanking secondary structures are described in Example 47 and FIG. 48 of PCT Publication No. WO 2020/123816, incorporated by reference herein in its entirety. In some embodiments, an ORF1 molecule comprises a region comprising one or more (e.g., 1, 2, 3, 4, 5, 6, 7, 8, 9, 10, or all) of the secondary structural elements (e.g., beta strands) shown in FIG. 48 of PCT Publication No. WO 2020/123816. In some embodiments, an ORF1 molecule comprises a region comprising one or more (e.g., 1, 2, 3, 4, 5, 6, 7, 8, 9, 10, or all) of the secondary structural elements (e.g., beta strands) shown in FIG. 48 of PCT Publication No. WO 2020/123816, incorporated by reference herein in its entirety, flanking a YNPX²DXGX²N (SEQ ID NO: 829) motif (e.g., as described herein).

### Conserved Secondary Structural Motif in ORF1 Structural Jelly-Roll Domain

[1737] In some embodiments, a polypeptide (e.g., an ORF1 molecule) described herein comprises one or more secondary structural elements comprised by an Anellovirus ORF1 protein (e.g., as described herein). In some emboiments, an ORF1 molecule comprises one or more secondary structural elements comprised by the structural jelly-roll domain of an Anellovius ORF1 protein (e.g., as described herein). Generally, an ORF1 structural jelly-roll domain comprises a secondary structure comprising, in order in the N-terminal to C-terminal direction, a first beta strand, a second beta strand, a first alpha helix, a third beta strand, a fourth beta strand, a fifth beta strand, a second alpha helix, a sixth beta strand, a seventh beta strand, an eighth beta strand, and a ninth beta strand. In some embodiments, an ORF1 molecule comprises a secondary structure comprising, in order in the N-terminal to C-terminal direction, a first beta strand, a second beta strand, a first alpha helix, a third beta strand, a fourth beta strand, a fifth beta strand, a second alpha helix, a sixth beta strand, a seventh beta strand, an eighth beta strand, and/or a ninth beta strand.

[1738] In some embodiments, a pair of the conserved secondary structural elements (i.e., the beta strands and/or alpha helices) are separated by an interstitial amino acid sequence, e.g., comprising a random coil sequence, a beta strand, or an alpha helix, or a combination thereof. Interstitial amino acid sequences between the conserved secondary structural elements may comprise, for example, 1, 2, 3, 4, 5, 6, 7, 8, 9, 10, 11, 12, 13, 14, 15, 16, 17, 18, 19, 20, 21, 22, 23, 24, 25, 26, 27, 28, 29, 30, or more amino acids. In some embodiments, an ORF1 molecule may further comprise one or more additional beta strands and/or alpha helices (e.g., in the structural jelly-roll domain). In some embodiments, consecutive beta strands or consecutive alpha helices may be combined. In some embodiments, the first beta strand and the second beta strand are comprised in a larger beta strand. In some embodiments, the third beta strand and the fourth beta strand are comprised in a larger beta strand. In some embodiments, the fourth beta strand and the fifth beta strand are comprised in a larger beta strand. In some embodiments, the sixth beta strand and the seventh beta strand are comprised in a larger beta strand. In some embodiments, the seventh beta strand and the eighth beta strand are comprised in a larger beta strand. In some embodiments, the eighth beta strand and the ninth beta strand are comprised in a larger beta strand.

[1739] In some embodiments, the first beta strand is about 5-7 (e.g., 3, 4, 5, 6, 7, 8, 9, or 10) amino acids in length. In some embodiments, the second beta strand is about 15-16 (e.g., 13, 14, 15, 16, 17, 18, or 19) amino acids in length. In some embodiments, the first alpha helix is about 15-17 (e.g., 13, 14, 15, 16, 17, 18, 19, or 20) amino acids in length. In some embodiments, the third beta strand is about 3-4 (e.g., 1, 2, 3, 4, 5, or 6) amino acids in length. In some embodiments, the fourth beta strand is about 10-11 (e.g., 8, 9, 10, 11, 12, or 13) amino acids in length. In some embodiments, the fifth beta strand is about 6-7 (e.g., 4, 5, 6, 7, 8, 9, or 10) amino acids in length. In some embodiments, the second alpha helix is about 8-14 (e.g., 5, 6, 7, 8, 9, 10, 11, 12, 13, 14, 15, 16, or 17) amino acids in length. In some embodiments, the second alpha helix may be broken up into two smaller alpha helices (e.g., separated by a random coil sequence). In some embodiments, each of the two smaller alpha helices are about 4-6 (e.g., 2, 3, 4, 5, 6, 7, or 8) amino acids in length. In some embodiments, the sixth beta strand is about 4-5 (e.g., 2, 3, 4, 5, 6, or 7) amino acids in length. In some embodiments, the seventh beta strand is about 5-6 (e.g., 3, 4, 5, 6, 7, 8, or 9) amino acids in length. In some embodiments, the eighth beta strand is about 7-9 (e.g., 5, 6, 7, 8, 9, 10, 11, 12, or 13) amino acids in length. In some embodiments, the ninth beta strand is about 5-7 (e.g., 3, 4, 5, 6, 7, 8, 9, or 10) amino acids in length.

[1740] Exemplary structural jelly-roll domain secondary structures are described in Example 47 and FIG. 47 of PCT Publication No. WO 2020/123816, incorporated by reference herein in its entirety. In some embodiments, an ORF1 molecule comprises a region comprising one or more (e.g., 1, 2, 3, 4, 5, 6, 7, 8, 9, 10, or all) of the secondary structural elements (e.g., beta strands and/or alpha helices) of any of the structural jelly-roll domain secondary structures shown in FIG. 47 of PCT Publication No. WO 2020/123816, incorporated by reference herein in its entirety.

### Exemplary ORF1 Sequences

[1741] In some embodiments, a polypeptide (e.g., an ORF1 molecule) described herein comprises an amino acid sequence having at least about 70%, 75%, 80%, 85%, 90%, 95%, 96%, 97%, 98%, 99%, or 100% sequence identity to one or more Anellovirus ORF1 subsequences, e.g., as described herein). In some embodiments, an Anelloviridae family vector (e.g., anellovector) described herein comprises an ORF1 molecule comprising an amino acid sequence having at least about 70%, 75%, 80%, 85%, 90%, 95%, 96%, 97%, 98%, 99%, or 100% sequence identity to one or more Anellovirus ORF1 subsequences, e.g., as described herein. In some embodiments, an anellovector described herein comprises a nucleic acid molecule (e.g., a genetic element) encoding an ORF1 molecule comprising an amino acid sequence having at least about 70%, 75%, 80%, 85%, 90%, 95%, 96%, 97%, 98%, 99%, or 100% sequence identity to one or more Anellovirus ORF1 subsequences, e.g., as described herein.

[1742] In some embodiments, the one or more Anellovirus ORF1 subsequences comprises one or more of a structural arginine (Arg)-rich domain, a structural jelly-roll domain, a hypervariable region (HVR), an structural N22 domain, or a structural C-terminal domain (CTD) (e.g., as listed herein), or sequences having at least about 70%, 75%, 80%, 85%, 90%, 95%, 96%, 97%, 98%, 99%, or 100% sequence identity thereto. In some embodiments, the ORF1 molecule comprises a plurality of subsequences from different Anelloviruses. In some embodiments, the ORF1 molecule comprises one or more of an Arg-rich domain, a structural jelly-roll domain, an structural N22 domain, and a CTD from one Anelloviridae family virus (e.g., Anellovirus), and an HVR from another. In some embodiments, the ORF1 molecule comprises one or more of a structural jelly-roll domain, an HVR, an structural N22 domain, and a CTD from one Anelloviridae family virus (e.g., Anellovirus), and an Arg-rich domain from another. In some embodiments, the ORF1 molecule comprises one or more of an Arg-rich domain, an HVR, an structural N22 domain, and a CTD from one Anellovirus, and a structural jelly-roll domain from another. In some embodiments, the ORF1 molecule comprises one or more of an Arg-rich domain, a structural jelly-roll domain, an HVR, and a CTD from one Anellovirus, and an structural N22 domain from another. In some embodiments, the ORF1 molecule comprises one or more of an Arg-rich domain, a structural jelly-roll domain, an HVR, and an structural N22 domain from one Anellovirus, and a CTD from another.

[1743] In some embodiments, the one or more Anellovirus ORF1 subsequences comprises one or more of a structural arginine (Arg)-rich domain, a portion of a jelly-roll domain comprising beta strands B—H (e.g., a jelly-roll B—H strands subdomain as described herein), a first portion of a P1 domain (e.g., a P1-1 sequence), a P2 domain, a second portion of a P1 domain (e.g., a P1-2 sequence), a portion of a jelly-roll domain comprising beta strand I (e.g., a jelly-roll I strand subdomain as described herein), or a structural C-terminal domain (CTD) (e.g., as listed herein), or sequences having at least about 70%, 75%, 80%, 85%, 90%, 95%, 96%, 97%, 98%, 99%, or 100% sequence identity thereto. In some embodiments, the ORF1 molecule comprises a plurality of subsequences from different Anelloviruses. In some embodiments, the ORF1 molecule comprises one or more of a structural arginine-rich domain, a portion of a jelly-roll domain comprising beta strands B—H (e.g., a jelly-roll B—H strands subdomain as described herein), a first portion of a P1 domain (e.g., a P1-1 sequence), a P2 domain, a second portion of a P1 domain (e.g., a P1-2 sequence), a portion of a jelly-roll domain comprising beta strand I (e.g., a jelly-roll I strand subdomain as described herein), and a structural C-terminal domain (CTD) (e.g., as listed herein) from another (e.g., as described herein).

[1744] In some embodiments, a polypeptide (e.g., an ORF1 molecule) described herein comprises an amino acid sequence having at least about 70%, 75%, 80%, 85%, 90%, 95%, 96%, 97%, 98%, 99%, or 100% sequence identity to one or more Anellovirus ORF1 domain subsequences, e.g., as described in any of Tables B1-1 to B1-12). In some embodiments, an anellosome described herein comprises an ORF1 molecule comprising an amino acid sequence having at least about 70%, 75%, 80%, 85%, 90%, 95%, 96%, 97%, 98%, 99%, or 100% sequence identity to one or more Anellovirus ORF1 subsequences, e.g., as described in any of Tables B1-1 to B1-12. In some embodiments, an anellosome described herein comprises a nucleic acid molecule (e.g., a genetic element) encoding an ORF1 molecule comprising an amino acid sequence having at least about 70%, 75%, 80%, 85%, 90%, 95%, 96%, 97%, 98%, 99%, or 100% sequence identity to one or more Anellovirus ORF1 subsequences, e.g., as described in any of Tables B1-1 to B1-12.

TABLE B1-1
Ring 2 ORF1 amino acid subsequences
(Betatorquevirus) with structural
HVR and structural N22 domain

| | |
|---|---|
| Structural | MPYYYRRRRYNYRRPRWYGRGWIRRPFRRRFRRK |
| Arginine- | RRVR (SEQ ID NO: 2517) |
| Rich | |
| Region | |
| (1-38) | |
| Structural | PTYTTIPLKQWQPPYKRTCYIKGQDCLIYYSNLR |
| jelly-roll | LGMNSTMYEKSIVPVHWPGGGSFSVSMLTLDALY |
| region | DIHKLCRNWWTSTNQDLPLVRYKGCKITFYQSTF |
| (39-224) | TDYIVRIHTELPANSNKLTYPNTHPLMMMMSKYK |
| | HIIPSRQTRRKKKPYTKIFVKPPPQFENKWYFAT |
| | DLYKIPLLQIHCTACN (SEQ ID NO: 2518) |
| Structural | LQNPFVKPDKLSNNVTLWSLNTISIQNRNMSVDQ |
| hypervariable | GQSWPFKILGTQSFYFYFYTGANLPGDTTQIPVA |
| region | DLLPLTNPRINRPGQSLNEAKITDHITFTEYKNK |
| (225-374) | FTNYWGNPFNKHIQEHLDMILYSLKSPEAIKNEW |
| | TTENMKWNQLNNAG (SEQ ID NO: 2519) |
| Structural | TMALTPFNEPIFTQIQYNPDRDTGEDTQLYLLSN |
| N22 domain | ATGTGWDPPGIPELILEGFPLWLIYWGFADFQKN |
| (375-541) | LKKVTNIDTNYMLVAKTKFTQKPGTFYLVILNDT |
| | FVEGNSPYEKQPLPEDNIKWYPQVQYQLEAQNKL |
| | LQTGPFTPNIQGQLSDNISMFYKFYFKWGGS |
| | (SEQ ID NO: 2520) |
| Structural | PPKAINVENPAHQIQYPIPRNEHETTSLQSPGEA |
| C-terminal | PESILYSFDYRHGNYTTTALSRISQDWALKDTVS |
| domain | KITEPDRQQLLKQALECLQISEETQEKKEKEVQQ |
| (542-666) | LISNLRQQQQLYRERIISLLKDQ (SEQ ID |
| | NO: 2521) |

TABLE B1-2
Ring 2 ORF1 amino acid subsequence
(Betatorquevirus) with P1 and P2 domains

| Structural | MPYYYRRRRYNYRRPRWYGRGWIRRPFRRRFRRKRRV |
|---|---|
| Arg-Rich | R (SEQ ID NO: 216) |
| Region | |
| (1-38) | |
| Jelly-roll | PTYTTIPLKQWQPPYKRTCYIKGQDCLIYYSNLRLGM |
| B-H | NSTMYEKSIVPVHWPGGGSFSVSMLTLDALYDIHKLC |
| strands | RNWWTSTNQDLPLVRYKGCKITFYQSTFTDYIVRIHT |
| subdomain | ELPANSNKLTYPNTHPLMMMMSKYKHIIPSRQTRRKK |
| (39-224) | KPYTKIFVKPPPQFENKWYFATDLYKIPLLQIHCTAC |
| | N (SEQ ID NO: 2518) |
| P1-1 | LQNPFVKPDKLSNNVTLWSL (SEQ ID NO: |
| (225-244) | 2707) |
| P2 | NTISIQNRNMSVDQGQSWPFKILGTQSFYFYFYTGAN |
| (245-385) | LPGDTTQIPVADLLPLTNPRINRPGQSLNEAKITDHI |
| | TFTEYKNKFTNYWGNPFNKHIQEHLDMILYSLKSPEA |
| | IKNEWTTENMKWNQLNNAGTMALTPFNEPI (SEQ |
| | ID NO: 2708) |
| P1-2 | FTQIQYNPDRDTGEDTQLYLLSNATGTGWDPPGIPEL |
| (386-524) | ILEGFPLWLIYWGFADFQKNLKKVTNIDTNYMLVAKT |
| | KFTQKPGTFYLVILNDTFVEGNSPYEKQPLPEDNIKW |
| | YPQVQYQLEAQNKLLQTGPFTPNIQGQL (SEQ ID |
| | NO: 2709) |
| Jelly-roll | SDNISMFYKFYFKWGGS (SEQ ID NO: 2710) |
| I strand | |
| subdomain | |
| (525-541) | |
| Structural | PPKAINVENPAHQIQYPIPRNEHETTSLQSPGEAPES |
| C-terminal | ILYSFDYRHGNYTTTALSRISQDWALKDTVSKITEPD |
| domain | RQQLLKQALECLQISEETQEKKEKEVQQLISNLRQQQ |
| (542-666) | QLYRERIISLLKDQ (SEQ ID NO: 2521) |

TABLE B1-3
Ring 9 ORF1 amino acid subsequence
(Betatorquevirus) with P1 and P2 domains

| | |
|---|---|
| Structural | MPPYWRQKYYRRRYRPFSWRTRRIIQRRKRWRYRK |
| Arg-Rich | PRKTYWRRKLRVRKRFYKR (SEQ ID NO: |
| Region | 2711) |
| (1-54) | |
| Jelly-Roll | KLKKIVLKQFQPKIIRRCTIFGTICLFQGSPERAN |
| B-H | NNYIQTIYSYVPDKEPGGGGWTLITESLSSLWEDW |
| strands | EHLKNVWTQSNAGLPLVRYGGVTLYFYQSAYTDYI |
| subdomain | AQVENCYPMTDTKYTHADSAPNRMLLKKHVIRVPS |
| (55-239) | RETRKKRKPYKRVRVGPPSQMQNKWYFORDICEIP |
| | LIMIAATAVD (SEQ ID NO: 2712) |
| P1-1 | FRYPFCASDCASNNLTLTCL (SEQ ID NO: |
| (240-259) | 2713) |
| P2 | NPLLFQNQDFDHPSDTQGYFPKPGVYLYSTQRSNK |
| (260-369) | PSSSDCIYLGNTKDNQEGKSASSLMTLKTQKITDW |
| | GNPFWHYYIDGSKKIFSYFKPPSQLDSSDFEHMTE |
| | LAEPM (SEQ ID NO: 2714) |
| P1-2 | FIQVRYNPERDTGQGNLIYVTENFRGQHWDPPSSD |
| (370-507) | NLKLDGFPLYDMCWGFIDWIEKVHETENLLTNYCF |
| | CIRSSAFNEKKTVFIPVDHSFLTGFSPYETPVKSS |
| | DQAHWHPQIRFQTKSINDICLTGPGCARSPYGN |
| | (SEQ ID NO: 2715) |
| Jelly-Roll | YMQAKMSYKFHVKWG (SEQ ID NO: 2716) |
| I strand | |
| subdomain | |
| (508-522) | |
| Structural | GCPKTYEKPYDPCSQPNWTIPHNLNETIQIQNPNT |
| C-terminal | CPQTELQEWDWRRDIVTKKAIERIRQHTEPHETLQ |
| domain | ISTGSKHNPPVHRQTSPWTDSETDSEEEKDQTQEI |
| (523-622) | QIQLNKLRKHQQHLKQQLKQYLKPQNIE (SEQ |
| | ID NO: 2717) |

TABLE B1-4
Ring10 ORF1 amino acid subsequence
(Betatorquevirus) with structural
HVR and structural N22 domain

| Structural | MPWWYRRRSYNPWRRRNWFRRPRKTIYRRYRRRRRWV |
|---|---|
| Arg-Rich | RRKPFYKR (SEQ ID NO: 2718) |
| Region | |
| (1-45) | |
| Structural | KIKRLNIVEWQPKSIRKCRIKGMLCLFQTTEDRLSYN |
| jelly-roll | FDMYEESIIPEKLPGGGGFSIKNISLYALYQEHIHAH |
| Domain | NIFTHTNTDRPLARYTGCSLKFYQSKDIDYVVTYSTS |
| (46-229) | LPLRSSMGMYNSMQPSIHLMQQNKLIVPSKQTQKRRK |
| | PYIKKHISPPTQMKSQWYFQHNIANIPLLMIRTTAL |
| | (SEQ ID NO: 2719) |
| Structural | TLDNYYIGSRQLSTNVTIHTLNTTYIQNRDWGDRNKT |
| hyper- | YYCQTLGTQRYFLYGTHSTAQNINDIKLQELIPLTNT |
| variable | QDYVQGFDWTEKDKHNITTYKEFLTKGAGNPFHAEWI |
| domain | TAQNPVIHTANSPTQIEQIYTASTTTFQNKKLTDLPT |
| (230-385) | PGYIFITP (SEQ ID NO: 2720) |
| Structural | TVSLRYNPYKDLAERNKCYFVRSKINAHGWDPEQHQE |
| N22 domain | LINSDLPQWLLLFGYPDYIKRTQNFALVDTNYILVDH |
| (386-543) | CPYTNPEKTPFIPLSTSFIEGRSPYSPSDTHEPDEED |
| | QNRWYPCYQYQQESINSICLSGPGTPKIPKGITAEAK |
| | VKYSFNFKWG (SEQ ID NO: 2721) |
| Structural | GDLPPMSTITNPTDQPTYVVPNNFNETTSLQNPTTRP |
| C-terminal | EHFLYSFDERRGQLTEKATKRLLKDWETKETSLLSTE |
| domain | YRFAEPTQTQAPQEDPSSEEEEESNLFERLLRQRTKQ |
| (544-672) | LQLKRRIIQTLKDLQKLE (SEQ ID NO: 2722) |

TABLE B1-5
Ring10 ORF1 amino acid subsequence
(Betatorquevirus) with P1 and P2 domains

| Structural | MPWWYRRRSYNPWRRRNWFRRPRKTIYRRYRRRRRWVR |
|---|---|
| Arg-Rich | RKPFYKR (SEQ ID NO: 2718) |
| Region | |
| (1-45) | |
| Jelly-roll | KIKRLNIVEWQPKSIRKCRIKGMLCLFQTTEDRLSYNF |
| B-H | DMYEESIIPEKLPGGGGFSIKNISLYALYQEHIHAHNI |
| strands | FTHTNTDRPLARYTGCSLKFYQSKDIDYVVTYSTSLPL |
| subdomain | RSSMGMYNSMQPSIHLMQQNKLIVPSKQTQKRRKPYIK |
| (46-229) | KHISPPTQMKSQWYFQHNIANIPLLMIRTTAL (SEQ |
| | ID NO: 2719) |
| P1-1 | TLDNYYIGSRQLSTNVTIHTL (SEQ ID NO: |
| (230-250aa) | 2723) |
| P2 | NTTYIQNRDWGDRNKTYYCQTLGTQRYFLYGTHSTAQN |
| (251-385) | INDIKLQELIPLTNTQDYVQGFDWTEKDKHNITTYKEF |
| | LTKGAGNPFHAEWITAQNPVIHTANSPTQIEQIYTAST |
| | TTFQNKKLTDLPTPGYIFITP (SEQ ID NO: |
| | 2724) |
| P1-2 | TVSLRYNPYKDLAERNKCYFVRSKINAHGWDPEQHQEL |
| (386-528aa) | INSDLPQWLLLFGYPDYIKRTQNFALVDTNYILVDHCP |
| | YTNPEKTPFIPLSTSFIEGRSPYSPSDTHEPDEEDQNR |
| | WYPCYQYQQESINSICLSGPGTPKIPKGI (SEQ ID |
| | NO: 2725) |
| Jelly-roll | TAEAKVKYSFNFKWG (SEQ ID NO: 2726) |
| I-strand | |
| subdomain | |
| (529-543) | |
| Structural | GDLPPMSTITNPTDQPTYVVPNNFNETTSLQNPTTRPE |
| C-terminal | HFLYSFDERRGQLTEKATKRLLKDWETKETSLLSTEYR |
| domain | FAEPTQTQAPQEDPSSEEEEESNLFERLLRQRTKQLQL |
| (544-672) | KRRIIQTLKDLQKLE (SEQ ID NO: 2722) |

TABLE B1-9
Ring18 ORF1 amino acid subsequence
(Alphatorquevirus) with P1 and P2
domains

| | |
|---|---|
| Structural | MAWGFWGRRRRWRRWRPRRRRWRPRRRRRRRPARRFR |
| Arg-Rich | ARRRVRRRGGRWRRRYRKWRRGRRRRTHRK (SEQ |
| Region | ID NO: 2727) |
| (1-67) | |
| Jelly-roll | KIVIKQWQPNFIRRCYIIGYLPLIFCGENTTAQNYAT |
| B-H | HSDDMISKGPYGGGMTTTKFTLRILYDEFTRFMNFWT |
| strands | VSNEDLDLCRYVGCKLIFFKHPTVDFIVQINTQPPFL |
| subdomain | DTHLTAASIHPGIMMLSKRRILIPSLKTRPSRKHRVV |
| (68-248) | VRVGAPRLFQDKWYPQSDLCDTVLLSIFATACD |
| | (SEQ ID NO: 2728) |
| P1-1 | LQYPFGSPLTDNPCVNFQILGPQYKKHLSIS (SEQ |
| (249-279) | ID NO: 2729) |
| P2 | STMDTTNKQHYDSNLFNQTQLYNTFQTIAQLKETGQT |
| (280-401) | ANISPSWSAVQNNMALSNTGENATQSKDTWYKGNTYN |
| | NHITTLAQKTRERFKGATKAALQNYPTIMSTDLYEYH |
| | SGIYSSIFLSA (SEQ ID NO: 2730) |
| P1-2 | GRSYFETTGAYSDIIYNPFTDKGTGNIIWIDYLTKED |
| (402-555) | TIFVKNKSKCEIMDMPLWAACTGYTEFCAKYTGDSAI |
| | IYNARVLIRCPYTEPMLIDHSDPNKGFVPYSFNFGNG |
| | KMPGGSSNVPIRMRAKWYVNIFHQKEVLETIVQSGPF |
| | GYKGDI (SEQ ID NO: 2731) |
| Jelly-roll | KSAVLAMKYRFHWKWGGNP (SEQ ID NO: 2732) |
| I-strand | |
| subdomain | |
| (556-574) | |
| Structural | ISKQVVRNPCSNSSSSAAHRGPRSVQAVDPKYNTPEV |
| C-terminal | TWHSWDIRRGLFGKAGIKRMQQESDALYIPPGPFKRP |
| domain | RRDTNAQDPEEQNESSGFRVQQRLPWVHSSQETQSSQ |
| (575-736) | EETEAQGSVQDQLLLQLREQRVLRLQLQQLATQVLKV |
| | QAGHGIHPLLSSQA (SEQ ID NO: 2733) |

TABLE B1-11a
Ring19 ORF1 subsequences with structural
HVR and structural N22 domain

| Structural | MPWYPRRRYPRRRYRWLRRWRARRPFRPRYRRRYWVR |
|---|---|
| Arg-Rich | NYSR (SEQ ID NO: 2734) |
| Region | |
| (1-41) | |
| Structural | KRKLFKITTKEWQPKVIRKTHVKGTYPLFLCTKHRIN |
| jelly-roll | NNMIQYLDSIAPEHYYGGGGFSIMQFSLQALYEEFIK |
| region | AKNWWTNTNCFLPLVRYMGCSFKFYKTEFYDYIVLIE |
| (42-228) | RCYPLACTDEMYLSTQPSIMMLTRKCIFVPCKQNSKG |
| | KKPYKKVRVRPPSQMTTGWHFSQDLANMPLVVLKTSV |
| | CS (SEQ ID NO: 2735) |
| Structural | FDRYYTDSTAKSTTIGFKTLNTQTFRYHDWQEPPTTG |
| hyper- | YKPQNLLWFYGAENGSPVDPNNTIVSNLIYLGGTGPY |
| variable | EKGTPIKTNISNYFSEPKLWGNIFHDDYTSGTSPVFV |
| domain | TNKSPSEIKTAWNTIKDLTVKASGVFTLRTIPL |
| (229-372) | (SEQ ID NO: 2736) |
| Structural | WLPCRYNPFADKATNNKIWLVSIHSDHTEWKPIDNPL |
| N22 domain | LQRTDLPLWLLVWGWQDWQKKNQQTSQPDINYLTVIS |
| (373-528) | SPYISCYPKLDYYVLLDEGFWEGHSTYIESITDSDKK |
| | HWYPKNRFQIETLNLIANTGPGTVKLRENQAAEGHMV |
| | YRFNFKLG (SEQ ID NO: 2737) |
| Structural | GCPAPMEKICDPSKQSKYPIPNNQQQTTSLQSPENPI |
| C-terminal | QTYLYDFDERRGLLTERATKRIKQDHTSEKTVLPFTG |
| domain | AATDLPILQTTSQEESSSEEEEEQQAEKKLLQLRRKQ |
| (529-655) | HRLRERILQLLDIQNT (SEQ ID NO: 2738) |

TABLE B1-12
Ring19 ORF1 subsequences with
P1 and P2 domains

| Structural | MPWYPRRRYPRRRYRWLRRWRARRPFRPRYRRRYWV |
|---|---|
| Arg-Rich | RNYSR (SEQ ID NO: 2734) |
| Region | |
| (1-41) | |
| Jelly-roll | KRKLFKITTKEWQPKVIRKTHVKGTYPLFLCTKHRI |
| B-H | NNNMIQYLDSIAPEHYYGGGGFSIMQFSLQALYEEF |
| strands | IKAKNWWTNTNCFLPLVRYMGCSFKFYKTEFYDYIV |
| subdomain | LIERCYPLACTDEMYLSTQPSIMMLTRKCIFVPCKQ |
| (42-228) | NSKGKKPYKKVRVRPPSQMTTGWHFSQDLANMPLVV |
| | LKTSVCS (SEQ ID NO: 2735) |
| P1-1 | FDRYYTDSTAKSTTIGFKT (SEQ ID NO: |
| (229-247aa) | 2739) |
| P2 | LNTQTFRYHDWQEPPTTGYKPQNLLWFYGAENGSPV |
| (248-372) | DPNNTIVSNLIYLGGTGPYEKGTPIKTNISNYFSEP |
| | KLWGNIFHDDYTSGTSPVFVTNKSPSEIKTAWNTIK |
| | DLTVKASGVFTLRTIPL (SEQ ID NO: 2740) |
| P1-2 | WLPCRYNPFADKATNNKIWLVSIHSDHTEWKPIDNP |
| (373-514aa) | LLQRTDLPLWLLVWGWQDWQKKNQQTSQPDINYLTV |
| | ISSPYISCYPKLDYYVLLDEGFWEGHSTYIESITDS |
| | DKKHWYPKNRFQIETLNLIANTGPGTVKLRENQA |
| | (SEQ ID NO: 2741) |
| Jelly-roll | AEGHMVYRFNFKLG (SEQ ID NO: 2742) |
| I-strand | |
| subdomain | |
| (515-528) | |
| Structural | GCPAPMEKICDPSKQSKYPIPNNQQQTTSLQSPENP |
| C-terminal | IQTYLYDFDERRGLLTERATKRIKQDHTSEKTVLPF |
| domain | TGAATDLPILQTTSQEESSSEEEEEQQAEKKLLQLR |
| (529-655) | RKQHRLRERILQLLDIQNT (SEQ ID NO: |
| | 2738) |

### Exemplary ORF1 Variant Construct Sequence Tables

[1745] Provided below are exemplary Anellovirus ORF1 mutant and variant sequences. These types of mutants and variants are described in further detail in the sections below.

TABLE B1-3a
Exemplary Ring2 variant constructs suitable for
expression in 293 cells

| #ID | Sequence |
|---|---|
| 1. Ring2 | MLKQWQPPYKRTCYIKGQDCLIYYSNLRLGMNSTMYEKSIVPVHWPGG |
| delARM | GSFSVSMLTLDALYDIHKLCRNWWTSTNQDLPLVRYKGCKITFYQSTF |
| (Δ2-45) | TDYIVRIHTELPANSNKLTYPNTHPLMMMMSKYKHIIPSRQTRRKKKP |
| (7046) | YTKIFVKPPPQFENKWYFATDLYKIPLLQIHCTACNLQNPFVKPDKLS |
| | NNVTLWSLNTISIQNRNMSVDQGQSWPFKILGTQSFYFYFYTGANLPG |
| | DTTQIPVADLLPLTNPRINRPGQSLNEAKITDHITFTEYKNKFTNYWG |
| | NPFNKHIQEHLDMILYSLKSPEAIKNEWTTENMKWNQLNNAGTMALTP |
| | FNEPIFTQIQYNPDRDTGEDTQLYLLSNATGTGWDPPGIPELILEGFP |
| | LWLIYWGFADFQKNLKKVTNIDTNYMLVAKTKFTQKPGTFYLVILNDT |
| | FVEGNSPYEKQPLPEDNIKWYPQVQYQLEAQNKLLQTGPFTPNIQGQL |
| | SDNISMFYKFYFKWGGSPPKAINVENPAHQIQYPIPRNEHETTSLQSP |
| | GEAPESILYSFDYRHGNYTTTALSRISQDWALKDTVSKITEPDRQQLL |
| | KQALECLQISEETQEKKEKEVQQLISNLRQQQQLYRERIISLLKDQ |
| | (SEQ ID NO: 2522) |
| 2. Ring2 | MPYYYRRRRYNYRRPRWYGRGWIRRPFRRRFRRKRRVRPTYTTIPLKQ |
| delCterm | WQPPYKRTCYIKGQDCLIYYSNLRLGMNSTMYEKSIVPVHWPGGGSFS |
| (Δ611-666) | VSMLTLDALYDIHKLCRNWWTSTNQDLPLVRYKGCKITFYQSTFTDYI |
| (7047) | VRIHTELPANSNKLTYPNTHPLMMMMSKYKHIIPSRQTRRKKKPYTKI |
| | FVKPPPQFENKWYFATDLYKIPLLQIHCTACNLQNPFVKPDKLSNNVT |
| | LWSLNTISIQNRNMSVDQGQSWPFKILGTQSFYFYFYTGANLPGDTTQ |
| | IPVADLLPLTNPRINRPGQSLNEAKITDHITFTEYKNKFTNYWGNPFN |
| | KHIQEHLDMILYSLKSPEAIKNEWTTENMKWNQLNNAGTMALTPFNEP |
| | IFTQIQYNPDRDTGEDTQLYLLSNATGTGWDPPGIPELILEGFPLWLI |
| | YWGFADFQKNLKKVTNIDTNYMLVAKTKFTQKPGTFYLVILNDTFVEG |
| | NSPYEKQPLPEDNIKWYPQVQYQLEAQNKLLQTGPFTPNIQGQLSDNI |
| | SMFYKFYFKWGGSPPKAINVENPAHQIQYPIPRNEHETTSLOSPGEAP |
| | ESILYSFDYRHGNYTTTALSRISQDWALKDTVSK (SEQ ID NO: |
| | 2523) |
| 3. Ring2 | MPYYYRRRRYNYRRPRWYGRGWIRRPFRRRFRRKRRVRPTYTTIPLKQ |
| delCterm | WQPPYKRTCYIKGQDCLIYYSNLRLGMNSTMYEKSIVPVHWPGGGSFS |
| (Δ538-666) | VSMLTLDALYDIHKLCRNWWTSTNQDLPLVRYKGCKITFYQSTFTDYI |
| (7048) | VRIHTELPANSNKLTYPNTHPLMMMMSKYKHIIPSRQTRRKKKPYTKI |
| | FVKPPPQFENKWYFATDLYKIPLLQIHCTACNLQNPFVKPDKLSNNVT |
| | LWSLNTISIQNRNMSVDQGQSWPFKILGTQSFYFYFYTGANLPGDTTQ |
| | IPVADLLPLTNPRINRPGQSLNEAKITDHITFTEYKNKFTNYWGNPFN |
| | KHIQEHLDMILYSLKSPEAIKNEWTTENMKWNQLNNAGTMALTPFNEP |
| | IFTQIQYNPDRDTGEDTQLYLLSNATGTGWDPPGIPELILEGFPLWLI |
| | YWGFADFQKNLKKVTNIDTNYMLVAKTKFTQKPGTFYLVILNDTFVEG |
| | NSPYEKQPLPEDNIKWYPQVQYQLEAQNKLLQTGPFTPNIQGQLSDNI |
| | SMFYKFYFK (SEQ ID NO: 2524) |
| 4. Ring2 | MLKQWQPPYKRTCYIKGQDCLIYYSNLRLGMNSTMYEKSIVPVHWPGG |
| delARM | GSFSVSMLTLDALYDIHKLCRNWWTSTNQDLPLVRYKGCKITFYQSTF |
| delCterm | TDYIVRIHTELPANSNKLTYPNTHPLMMMMSKYKHIIPSRQTRRKKKP |
| (Δ2-45 + | YTKIFVKPPPQFENKWYFATDLYKIPLLQIHCTACNLQNPFVKPDKLS |
| Δ611-666) | NNVTLWSLNTISIQNRNMSVDQGQSWPFKILGTQSFYFYFYTGANLPG |
| (7049) | DTTQIPVADLLPLTNPRINRPGQSLNEAKITDHITFTEYKNKFTNYWG |
| | NPFNKHIQEHLDMILYSLKSPEAIKNEWTTENMKWNQLNNAGTMALTP |
| | FNEPIFTQIQYNPDRDTGEDTQLYLLSNATGTGWDPPGIPELILEGFP |
| | LWLIYWGFADFQKNLKKVTNIDTNYMLVAKTKFTQKPGTFYLVILNDT |
| | FVEGNSPYEKQPLPEDNIKWYPQVQYQLEAQNKLLQTGPFTPNIQGQL |
| | SDNISMFYKFYFKWGGSPPKAINVENPAHQIQYPIPRNEHETTSLOSP |
| | GEAPESILYSFDYRHGNYTTTALSRISQDWALKDTVSK (SEQ ID |
| | NO: 2525) |
| 5. Ring2- | MLKQWQPPYKRTCYIKGQDCLIYYSNLRLGMNSTMYEKSIVPVHWPGG |
| ORF1 | GSFSVSMLTLDALYDIHKLCRNWWTSTNQDLPLVRYKGCKITFYQSTF |
| delARM | TDYIVRIHTELPANSNKLTYPNTHPLMMMMSKYKHIIPSRQTRRKKKP |
| delCterm | YTKIFVKPPPQFENKWYFATDLYKIPLLQIHCTACNLQNPFVKPDKLS |
| (Δ2-45 + | NNVTLWSLNTISIQNRNMSVDQGQSWPFKILGTQSFYFYFYTGANLPG |
| Δ538-666) | DTTQIPVADLLPLTNPRINRPGQSLNEAKITDHITFTEYKNKFTNYWG |
| (7050) | NPFNKHIQEHLDMILYSLKSPEAIKNEWTTENMKWNQLNNAGTMALTP |
| | FNEPIFTQIQYNPDRDTGEDTQLYLLSNATGTGWDPPGIPELILEGFP |
| | LWLIYWGFADFQKNLKKVTNIDTNYMLVAKTKFTQKPGTFYLVILNDT |
| | FVEGNSPYEKQPLPEDNIKWYPQVQYQLEAQNKLLQTGPFTPNIQGQL |
| | SDNISMFYKFYFK (SEQ ID NO: 2526) |

TABLE B1-3b
Exemplary Ring2 Baculovirus constructs

| #ID | Sequence |
|---|---|
| 6. Ring2 | MLKQWQPPYKRTCYIKGQDCLIYYSNLRLGMNSTMYEKSIVPVHWPGG |
| delARM | GSFSVSMLTLDALYDIHKLCRNWWTSTNQDLPLVRYKGCKITFYQSTF |
| (Δ2-45) | TDYIVRIHTELPANSNKLTYPNTHPLMMMMSKYKHIIPSRQTRRKKKP |
| and Orf2 | YTKIFVKPPPQFENKWYFATDLYKIPLLQIHCTACNLQNPFVKPDKLS |
| (5130) | NNVTLWSLNTISIQNRNMSVDQGQSWPFKILGTQSFYFYFYTGANLPG |
| | DTTQIPVADLLPLTNPRINRPGQSLNEAKITDHITFTEYKNKFTNYWG |
| | NPFNKHIQEHLDMILYSLKSPEAIKNEWTTENMKWNQLNNAGTMALTP |
| | FNEPIFTQIQYNPDRDTGEDTQLYLLSNATGTGWDPPGIPELILEGFP |
| | LWLIYWGFADFQKNLKKVTNIDTNYMLVAKTKFTQKPGTFYLVILNDT |
| | FVEGNSPYEKQPLPEDNIKWYPQVQYQLEAQNKLLQTGPFTPNIQGQL |
| | SDNISMFYKFYFKWGGSPPKAINVENPAHQIQYPIPRNEHETTSLQSP |
| | GEAPESILYSFDYRHGNYTTTALSRISQDWALKDTVSKITEPDRQQLL |
| | KQALECLQISEETQEKKEKEVQQLISNLRQQQQLYRERIISLLKDQ |
| | (SEQ ID NO: 2527) |
| 7. Ring2 | MLKQWQPPYKRTCYIKGQDCLIYYSNLRLGMNSTMYEKSIVPVHWPGG |
| delARM | GSFSVSMLTLDALYDIHKLCRNWWTSTNQDLPLVRYKGCKITFYQSTF |
| delCterm | TDYIVRIHTELPANSNKLTYPNTHPLMMMMSKYKHIIPSRQTRRKKKP |
| (Δ2-45 + | YTKIFVKPPPQFENKWYFATDLYKIPLLQIHCTACNLQNPFVKPDKLS |
| Δ545-666) | NNVTLWSLNTISIQNRNMSVDQGQSWPFKILGTQSFYFYFYTGANLPG |
| Orf2 | DTTQIPVADLLPLTNPRINRPGQSLNEAKITDHITFTEYKNKFTNYWG |
| (5131) | NPFNKHIQEHLDMILYSLKSPEAIKNEWTTENMKWNQLNNAGTMALTP |
| | FNEPIFTQIQYNPDRDTGEDTQLYLLSNATGTGWDPPGIPELILEGFP |
| | LWLIYWGFADFQKNLKKVTNIDTNYMLVAKTKFTQKPGTFYLVILNDT |
| | FVEGNSPYEKQPLPEDNIKWYPQVQYQLEAQNKLLQTGPFTPNIQGQL |
| | SDNISMFYKFYFKWGGSPPK (SEQ ID NO: 2528) |
| 8. Ring2 | MLKQWQPPYKRTCYIKGQDCLIYYSNLRLGMNSTMYEKSIVPVHWPGG |
| delARM | GSFSVSMLTLDALYDIHKLCRNWWTSTNQDLPLVRYKGCKITFYQSTF |
| delCterm | TDYIVRIHTELPANSNKLTYPNTHPLMMMMSKYKHIIPSRQTRRKKKP |
| (Δ2-45 + | YTKIFVKPPPQFENKWYFATDLYKIPLLQIHCTACNLQNPFVKPDKLS |
| Δ538-666) | NNVTLWSLNTISIQNRNMSVDQGQSWPFKILGTQSFYFYFYTGANLPG |
| ORF2 | DTTQIPVADLLPLTNPRINRPGQSLNEAKITDHITFTEYKNKFTNYWG |
| (5132) | NPFNKHIQEHLDMILYSLKSPEAIKNEWTTENMKWNQLNNAGTMALTP |
| | FNEPIFTQIQYNPDRDTGEDTQLYLLSNATGTGWDPPGIPELILEGFP |
| | LWLIYWGFADFQKNLKKVTNIDTNYMLVAKTKFTQKPGTFYLVILNDT |
| | FVEGNSPYEKQPLPEDNIKWYPQVQYQLEAQNKLLQTGPFTPNIQGQL |
| | SDNISMFYKFYFK (SEQ ID NO: 2529) |
| 9. Ring2 | MPYYYRRRRYNYRRPRWYGRGWIRRPFRRRFRRKRRVRPTYTTIPLKQ |
| delARM | WQPPYKRTCYIKGQDCLIYYSNLRLGMNSTMYEKSIVPVHWPGGGSFS |
| delCterm | VSMLTLDALYDIHKLCRNWWTSTNQDLPLVRYKGCKITFYQSTFTDYI |
| (Δ2-45 + | VRIHTELPANSNKLTYPNTHPLMMMMSKYKHIIPSRQTRRKKKPYTKI |
| Δ518-666) | FVKPPPQFENKWYFATDLYKIPLLQIHCTACNLQNPFVKPDKLSNNVT |
| ORF2 | LWSLNTISIQNRNMSVDQGQSWPFKILGTQSFYFYFYTGANLPGDTTQ |
| (5136) | IPVADLLPLTNPRINRPGQSLNEAKITDHITFTEYKNKFTNYWGNPFN |
| | KHIQEHLDMILYSLKSPEAIKNEWTTENMKWNQLNNAGTMALTPFNEP |
| | IFTQIQYNPDRDTGEDTQLYLLSNATGTGWDPPGIPELILEGFPLWLI |
| | YWGFADFQKNLKKVTNIDTNYMLVAKTKFTQKPGTFYLVILNDTFVEG |
| | NSPYEKQPLPEDNIKWYPQVQYQLEAQNKLLQTGPFT (SEQ ID |
| | NO: 2530) |
| 10. Ring2 | MPYYYRRRRYNYRRPRWYGRGWIRRPFRRRFRRKRRVRPTYTTIPLKQ |
| ORF1 | WQPPYKRTCYIKGQDCLIYYSNLRLGMNSTMYEKSIVPVHWPGGGSFS |
| delCterm | VSMLTLDALYDIHKLCRNWWTSTNQDLPLVRYKGCKITFYQSTFTDYI |
| (Δ538-666) | VRIHTELPANSNKLTYPNTHPLMMMMSKYKHIIPSRQTRRKKKPYTKI |
| ORF2 | FVKPPPQFENKWYFATDLYKIPLLQIHCTACNLQNPFVKPDKLSNNVT |
| (5137) | LWSLNTISIQNRNMSVDQGQSWPFKILGTQSFYFYFYTGANLPGDTTQ |
| | IPVADLLPLTNPRINRPGQSLNEAKITDHITFTEYKNKFTNYWGNPFN |
| | KHIQEHLDMILYSLKSPEAIKNEWTTENMKWNQLNNAGTMALTPFNEP |
| | IFTQIQYNPDRDTGEDTQLYLLSNATGTGWDPPGIPELILEGFPLWLI |
| | YWGFADFQKNLKKVTNIDTNYMLVAKTKFTQKPGTFYLVILNDTFVEG |
| | NSPYEKQPLPEDNIKWYPQVQYQLEAQNKLLQTGPFTPNIQGQLSDNI |
| | SMFYKFYFK (SEQ ID NO: 2531) |
| 11. Ring2 | MPYYYRRRRYNYRRPRWYGRGWIRRPFRRRFRRKRRVRPTYTTIPLKQ |
| ORF1 | WQPPYKRTCYIKGQDCLIYYSNLRLGMNSTMYEKSIVPVHWPGGGSFS |
| delCterm | VSMLTLDALYDIHKLCRNWWTSTNQDLPLVRYKGCKITFYQSTFTDYI |
| (Δ594-666) | VRIHTELPANSNKLTYPNTHPLMMMMSKYKHIIPSRQTRRKKKPYTKI |
| ORF2 | FVKPPPQFENKWYFATDLYKIPLLQIHCTACNLQNPFVKPDKLSNNVT |
| (5138) | LWSLNTISIQNRNMSVDQGQSWPFKILGTQSFYFYFYTGANLPGDTTQ |
| | IPVADLLPLTNPRINRPGQSLNEAKITDHITFTEYKNKFTNYWGNPFN |
| | KHIQEHLDMILYSLKSPEAIKNEWTTENMKWNQLNNAGTMALTPFNEP |
| | IFTQIQYNPDRDTGEDTQLYLLSNATGTGWDPPGIPELILEGFPLWLI |
| | YWGFADFQKNLKKVTNIDTNYMLVAKTKFTQKPGTFYLVILNDTFVEG |
| | NSPYEKQPLPEDNIKWYPQVQYQLEAQNKLLQTGPFTPNIQGQLSDNI |
| | SMFYKFYFKWGGSPPKAINVENPAHQIQYPIPRNEHETTSLOSPGEAP |
| | ESILYSFDYRHGNYTTT (SEQ ID NO: 2532) |
| 12. Ring 2 | MPYYYRRRRYNYRRPRWYGRGWIRRPFRRRFRRKRRVRPTYTTIPLKQ |
| ORF1 | WQPPYKRTCYIKGQDCLIYYSNLRLGMNSTMYEKSIVPVHWPGGGSFS |
| delCterm | VSMLTLDALYDIHKLCRNWWTSTNQDLPLVRYKGCKITFYQSTFTDYI |
| (Δ630-666) | VRIHTELPANSNKLTYPNTHPLMMMMSKYKHIIPSRQTRRKKKPYTKI |
| ORF2 | FVKPPPQFENKWYFATDLYKIPLLQIHCTACNLQNPFVKPDKLSNNVT |
| (5139) | LWSLNTISIQNRNMSVDQGQSWPFKILGTQSFYFYFYTGANLPGDTTQ |
| | IPVADLLPLTNPRINRPGQSLNEAKITDHITFTEYKNKFTNYWGNPFN |
| | KHIQEHLDMILYSLKSPEAIKNEWTTENMKWNQLNNAGTMALTPFNEP |
| | IFTQIQYNPDRDTGEDTQLYLLSNATGTGWDPPGIPELILEGFPLWLI |
| | YWGFADFQKNLKKVTNIDTNYMLVAKTKFTQKPGTFYLVILNDTFVEG |
| | NSPYEKQPLPEDNIKWYPQVQYQLEAQNKLLQTGPFTPNIQGQLSDNI |
| | SMFYKFYFKWGGSPPKAINVENPAHQIQYPIPRNEHETTSLOSPGEAP |
| | ESILYSFDYRHGNYTTTALSRISQDWALKDTVSKITEPDRQQLLKQAL |
| | ECLQI (SEQ ID NO: 2533) |

TABLE B1-6
293 constructs for Ring10 delARM/C-terminal deletions

| #ID | sequence |
|---|---|
| 13. Ring10 | MIVEWQPKSIRKCRIKGMLCLFQTTEDRLSYNFDMYEESIIPEKLPGGGG |
| delARM | FSIKNISLYALYQEHIHAHNIFTHTNTDRPLARYTGCSLKFYQSKDIDYV |
| (Δ2-51) | VTYSTSLPLRSSMGMYNSMQPSIHLMQQNKLIVPSKQTQKRRKPYIKKHI |
| (7051) | SPPTQMKSQWYFQHNIANIPLLMIRTTALTLDNYYIGSRQLSTNVTIHTL |
| | NTTYIQNRDWGDRNKTYYCQTLGTQRYFLYGTHSTAQNINDIKLQELIPL |
| | TNTQDYVQGFDWTEKDKHNITTYKEFLTKGAGNPFHAEWITAQNPVIHTA |
| | NSPTQIEQIYTASTTTFQNKKLTDLPTPGYIFITPTVSLRYNPYKDLAER |
| | NKCYFVRSKINAHGWDPEQHQELINSDLPQWLLLFGYPDYIKRTQNFALV |
| | DTNYILVDHCPYTNPEKTPFIPLSTSFIEGRSPYSPSDTHEPDEEDQNRW |
| | YPCYQYQQESINSICLSGPGTPKIPKGITAEAKVKYSFNFKWGGDLPPMS |
| | TITNPTDQPTYVVPNNFNETTSLONPTTRPEHFLYSFDERRGQLTEKATK |
| | RLLKDWETKETSLLSTEYRFAEPTQTQAPQEDPSSEEEEESNLFERLLRQ |
| | RTKQLQLKRRIIQTLKDLQKLE (SEQ ID NO: 2534) |
| 14. Ring10- | MPWWYRRRSYNPWRRRNWFRRPRKTIYRRYRRRRRWVRRKPFYKRKIKRL |
| ORF1 | NIVEWQPKSIRKCRIKGMLCLFQTTEDRLSYNFDMYEESIIPEKLPGGGG |
| delCterm- | FSIKNISLYALYQEHIHAHNIFTHTNTDRPLARYTGCSLKFYQSKDIDYV |
| Helix | VTYSTSLPLRSSMGMYNSMQPSIHLMQQNKLIVPSKQTQKRRKPYIKKHI |
| (Δ610-672) | SPPTQMKSQWYFQHNIANIPLLMIRTTALTLDNYYIGSRQLSTNVTIHTL |
| (7052) | NTTYIQNRDWGDRNKTYYCQTLGTQRYFLYGTHSTAQNINDIKLQELIPL |
| | TNTQDYVQGFDWTEKDKHNITTYKEFLTKGAGNPFHAEWITAQNPVIHTA |
| | NSPTQIEQIYTASTTTFQNKKLTDLPTPGYIFITPTVSLRYNPYKDLAER |
| | NKCYFVRSKINAHGWDPEQHQELINSDLPQWLLLFGYPDYIKRTQNFALV |
| | DTNYILVDHCPYTNPEKTPFIPLSTSFIEGRSPYSPSDTHEPDEEDQNRW |
| | YPCYQYQQESINSICLSGPGTPKIPKGITAEAKVKYSFNFKWGGDLPPMS |
| | TITNPTDQPTYVVPNNFNETTSLQNPTTRPEHFLYSFDERRGQLTEKATK |
| | RLLKDWETK (SEQ ID NO: 2535) |
| 15. Ring10- | MPWWYRRRSYNPWRRRNWFRRPRKTIYRRYRRRRRWVRRKPFYKRKIKRL |
| ORF1 | NIVEWQPKSIRKCRIKGMLCLFQTTEDRLSYNFDMYEESIIPEKLPGGGG |
| delCterm- | FSIKNISLYALYQEHIHAHNIFTHTNTDRPLARYTGCSLKFYQSKDIDYV |
| Helix | VTYSTSLPLRSSMGMYNSMQPSIHLMQQNKLIVPSKQTQKRRKPYIKKHI |
| (Δ542-672) | SPPTQMKSQWYFQHNIANIPLLMIRTTALTLDNYYIGSRQLSTNVTIHTL |
| (7053) | NTTYIQNRDWGDRNKTYYCQTLGTQRYFLYGTHSTAQNINDIKLQELIPL |
| | TNTQDYVQGFDWTEKDKHNITTYKEFLTKGAGNPFHAEWITAQNPVIHTA |
| | NSPTQIEQIYTASTTTFQNKKLTDLPTPGYIFITPTVSLRYNPYKDLAER |
| | NKCYFVRSKINAHGWDPEQHQELINSDLPQWLLLFGYPDYIKRTQNFALV |
| | DTNYILVDHCPYTNPEKTPFIPLSTSFIEGRSPYSPSDTHEPDEEDQNRW |
| | YPCYQYQQESINSICLSGPGTPKIPKGITAEAKVKYSFNFK (SEQ ID |
| | NO: 2536) |
| 16. Ring10- | MIVEWQPKSIRKCRIKGMLCLFQTTEDRLSYNFDMYEESIIPEKLPGGGG |
| ORF1 | FSIKNISLYALYQEHIHAHNIFTHTNTDRPLARYTGCSLKFYQSKDIDYV |
| delARM | VTYSTSLPLRSSMGMYNSMQPSIHLMQQNKLIVPSKQTQKRRKPYIKKHI |
| delCterm- | SPPTQMKSQWYFQHNIANIPLLMIRTTALTLDNYYIGSRQLSTNVTIHTL |
| Helix | NTTYIQNRDWGDRNKTYYCQTLGTQRYFLYGTHSTAQNINDIKLQELIPL |
| (Δ2-51 + | TNTQDYVQGFDWTEKDKHNITTYKEFLTKGAGNPFHAEWITAQNPVIHTA |
| 610-672) | NSPTQIEQIYTASTTTFQNKKLTDLPTPGYIFITPTVSLRYNPYKDLAER |
| (7054) | NKCYFVRSKINAHGWDPEQHQELINSDLPQWLLLFGYPDYIKRTQNFALV |
| | DTNYILVDHCPYTNPEKTPFIPLSTSFIEGRSPYSPSDTHEPDEEDQNRW |
| | YPCYQYQQESINSICLSGPGTPKIPKGITAEAKVKYSFNFKWGGDLPPMS |
| | TITNPTDQPTYVVPNNFNETTSLQNPTTRPEHFLYSFDERRGQLTEKATK |
| | RLLKDWETK (SEQ ID NO: 2537) |
| 17. Ring10- | MIVEWQPKSIRKCRIKGMLCLFQTTEDRLSYNFDMYEESIIPEKLPGGGG |
| ORF1 | FSIKNISLYALYQEHIHAHNIFTHTNTDRPLARYTGCSLKFYQSKDIDYV |
| delARM | VTYSTSLPLRSSMGMYNSMQPSIHLMQQNKLIVPSKQTQKRRKPYIKKHI |
| delCterm | SPPTQMKSQWYFQHNIANIPLLMIRTTALTLDNYYIGSRQLSTNVTIHTL |
| (Δ2-51 + | NTTYIQNRDWGDRNKTYYCQTLGTQRYFLYGTHSTAQNINDIKLQELIPL |
| 542-672) | TNTQDYVQGFDWTEKDKHNITTYKEFLTKGAGNPFHAEWITAQNPVIHTA |
| (7055) | NSPTQIEQIYTASTTTFQNKKLTDLPTPGYIFITPTVSLRYNPYKDLAER |
| | NKCYFVRSKINAHGWDPEQHQELINSDLPQWLLLFGYPDYIKRTQNFALV |
| | DTNYILVDHCPYTNPEKTPFIPLSTSFIEGRSPYSPSDTHEPDEEDQNRW |
| | YPCYQYQQESINSICLSGPGTPKIPKGITAEAKVKYSFNFK (SEQ ID |
| | NO: 2538) |
| 18. Ring10 | MKIKRLNIVEWQPKSIRKCRIKGMLCLFQTTEDRLSYNFDMYEESIIPEK |
| ORF1 | LPGGGGFSIKNISLYALYQEHIHAHNIFTHTNTDRPLARYTGCSLKFYQS |
| delARM | KDIDYVVTYSTSLPLRSSMGMYNSMQPSIHLMQQNKLIVPSKQTQKRRKP |
| (Δ2-45) | YIKKHISPPTQMKSQWYFQHNIANIPLLMIRTTALTLDNYYIGSRQLSTN |
| (7092) | VTIHTLNTTYIQNRDWGDRNKTYYCQTLGTQRYFLYGTHSTAQNINDIKL |
| | QELIPLTNTQDYVQGFDWTEKDKHNITTYKEFLTKGAGNPFHAEWITAQN |
| | PVIHTANSPTQIEQIYTASTTTFQNKKLTDLPTPGYIFITPTVSLRYNPY |
| | KDLAERNKCYFVRSKINAHGWDPEQHQELINSDLPQWLLLFGYPDYIKRT |
| | QNFALVDTNYILVDHCPYTNPEKTPFIPLSTSFIEGRSPYSPSDTHEPDE |
| | EDQNRWYPCYQYQQESINSICLSGPGTPKIPKGITAEAKVKYSFNFKWGG |
| | DLPPMSTITNPTDQPTYVVPNNFNETTSLQNPTTRPEHFLYSFDERRGQL |
| | TEKATKRLLKDWETKETSLLSTEYRFAEPTQTQAPQEDPSSEEEEESNLF |
| | ERLLRQRTKQLQLKRRIIQTLKDLQKLE (SEQ ID NO: 2539) |
| 19. Ring 10 | MKIKRLNIVEWQPKSIRKCRIKGMLCLFQTTEDRLSYNFDMYEESIIPEK |
| delARM | LPGGGGFSIKNISLYALYQEHIHAHNIFTHTNTDRPLARYTGCSLKFYQS |
| delCterm- | KDIDYVVTYSTSLPLRSSMGMYNSMQPSIHLMQQNKLIVPSKQTQKRRKP |
| 568 | YIKKHISPPTQMKSQWYFQHNIANIPLLMIRTTALTLDNYYIGSRQLSTN |
| (Δ2-45 + | VTIHTLNTTYIQNRDWGDRNKTYYCQTLGTQRYFLYGTHSTAQNINDIKL |
| Δ569-672) | QELIPLTNTQDYVQGFDWTEKDKHNITTYKEFLTKGAGNPFHAEWITAQN |
| (7093) | PVIHTANSPTQIEQIYTASTTTFQNKKLTDLPTPGYIFITPTVSLRYNPY |
| | KDLAERNKCYFVRSKINAHGWDPEQHQELINSDLPQWLLLFGYPDYIKRT |
| | QNFALVDTNYILVDHCPYTNPEKTPFIPLSTSFIEGRSPYSPSDTHEPDE |
| | EDQNRWYPCYQYQQESINSICLSGPGTPKIPKGITAEAKVKYSFNFKWGG |
| | DLPPMSTITNPTDQPTYVVPNNEN (SEQ ID NO: 2540) |
| 20. Ring 10 | MKIKRLNIVEWQPKSIRKCRIKGMLCLFQTTEDRLSYNFDMYEESIIPEK |
| delARM | LPGGGGFSIKNISLYALYQEHIHAHNIFTHTNTDRPLARYTGCSLKFYQS |
| delCterm | KDIDYVVTYSTSLPLRSSMGMYNSMQPSIHLMQQNKLIVPSKQTQKRRKP |
| (Δ2-45 + | YIKKHISPPTQMKSQWYFQHNIANIPLLMIRTTALTLDNYYIGSRQLSTN |
| Δ566-672) | VTIHTLNTTYIQNRDWGDRNKTYYCQTLGTQRYFLYGTHSTAQNINDIKL |
| (7094) | QELIPLTNTQDYVQGFDWTEKDKHNITTYKEFLTKGAGNPFHAEWITAQN |
| | PVIHTANSPTQIEQIYTASTTTFQNKKLTDLPTPGYIFITPTVSLRYNPY |
| | KDLAERNKCYFVRSKINAHGWDPEQHQELINSDLPQWLLLFGYPDYIKRT |
| | QNFALVDTNYILVDHCPYTNPEKTPFIPLSTSFIEGRSPYSPSDTHEPDE |
| | EDQNRWYPCYQYQQESINSICLSGPGTPKIPKGITAEAKVKYSFNFKWGG |
| | DLPPMSTITNPTDQPTYVVPN (SEQ ID NO: 2541) |
| 21. Ring 10 | MKIKRLNIVEWQPKSIRKCRIKGMLCLFQTTEDRLSYNFDMYEESIIPEK |
| delARM | LPGGGGFSIKNISLYALYQEHIHAHNIFTHTNTDRPLARYTGCSLKFYQS |
| delCterm | KDIDYVVTYSTSLPLRSSMGMYNSMQPSIHLMQQNKLIVPSKQTQKRRKP |
| (Δ2-45 + | YIKKHISPPTQMKSQWYFQHNIANIPLLMIRTTALTLDNYYIGSRQLSTN |
| Δ560-672) | VTIHTLNTTYIQNRDWGDRNKTYYCQTLGTQRYFLYGTHSTAQNINDIKL |
| (7095) | QELIPLTNTQDYVQGFDWTEKDKHNITTYKEFLTKGAGNPFHAEWITAQN |
| | PVIHTANSPTQIEQIYTASTTTFQNKKLTDLPTPGYIFITPTVSLRYNPY |
| | KDLAERNKCYFVRSKINAHGWDPEQHQELINSDLPQWLLLFGYPDYIKRT |
| | QNFALVDTNYILVDHCPYTNPEKTPFIPLSTSFIEGRSPYSPSDTHEPDE |
| | EDQNRWYPCYQYQQESINSICLSGPGTPKIPKGITAEAKVKYSFNFKWGG |
| | DLPPMSTITNPTDQP (SEQ ID NO: 2542) |
| 22. Ring 10 | MKIKRLNIVEWQPKSIRKCRIKGMLCLFQTTEDRLSYNFDMYEESIIPEK |
| delARM | LPGGGGFSIKNISLYALYQEHIHAHNIFTHTNTDRPLARYTGCSLKFYQS |
| delCterm | KDIDYVVTYSTSLPLRSSMGMYNSMQPSIHLMQQNKLIVPSKQTQKRRKP |
| (Δ2-45 + | YIKKHISPPTQMKSQWYFQHNIANIPLLMIRTTALTLDNYYIGSRQLSTN |
| Δ557-672) | VTIHTLNTTYIQNRDWGDRNKTYYCQTLGTQRYFLYGTHSTAQNINDIKL |
| (7096) | QELIPLTNTQDYVQGFDWTEKDKHNITTYKEFLTKGAGNPFHAEWITAQN |
| | PVIHTANSPTQIEQIYTASTTTFQNKKLTDLPTPGYIFITPTVSLRYNPY |
| | KDLAERNKCYFVRSKINAHGWDPEQHQELINSDLPQWLLLFGYPDYIKRT |
| | QNFALVDTNYILVDHCPYTNPEKTPFIPLSTSFIEGRSPYSPSDTHEPDE |
| | EDQNRWYPCYQYQQESINSICLSGPGTPKIPKGITAEAKVKYSFNFKWGG |
| | DLPPMSTITNPT (SEQ ID NO: 2543) |

TABLE B1-7
Ring10 Baculovirus constructs

| #ID | Sequence |
|---|---|
| 23. Ring10 | MKIKRLNIVEWQPKSIRKCRIKGMLCLFQTTEDRLSYNFDMYEESIIPEK |
| delARM | LPGGGGFSIKNISLYALYQEHIHAHNIFTHTNTDRPLARYTGCSLKFYQS |
| (Δ2-45) | KDIDYVVTYSTSLPLRSSMGMYNSMQPSIHLMQQNKLIVPSKQTQKRR |
| (5125) | KPYIKKHISPPTQMKSQWYFQHNIANIPLLMIRTTALTLDNYYIGSRQLS |
| | TNVTIHTLNTTYIQNRDWGDRNKTYYCQTLGTQRYFLYGTHSTAQNIN |
| | DIKLQELIPLTNTQDYVQGFDWTEKDKHNITTYKEFLTKGAGNPFHAE |
| | WITAQNPVIHTANSPTQIEQIYTASTTTFQNKKLTDLPTPGYIFITPTVSLR |
| | YNPYKDLAERNKCYFVRSKINAHGWDPEQHQELINSDLPQWLLLFGYP |
| | DYIKRTQNFALVDTNYILVDHCPYTNPEKTPFIPLSTSFIEGRSPYSPSDT |
| | HEPDEEDQNRWYPCYQYQQESINSICLSGPGTPKIPKGITAEAKVKYSFN |
| | FKWGGDLPPMSTITNPTDQPTYVVPNNFNETTSLQNPTTRPEHFLYSFD |
| | ERRGQLTEKATKRLLKDWETKETSLLSTEYRFAEPTQTQAPQEDPSSEE |
| | EEESNLFERLLRQRTKQLQLKRRIIQTLKDLQKLE (SEQ ID NO: 2544) |
| 24. Ring10 | MIVEWQPKSIRKCRIKGMLCLFQTTEDRLSYNFDMYEESIIPEKLPGGGG |
| delARM | FSIKNISLYALYQEHIHAHNIFTHTNTDRPLARYTGCSLKFYQSKDIDYV |
| (Δ2-51) | VTYSTSLPLRSSMGMYNSMQPSIHLMQQNKLIVPSKQTQKRRKPYIKK |
| (5149) | HISPPTQMKSQWYFQHNIANIPLLMIRTTALTLDNYYIGSRQLSTNVTIH |
| | TLNTTYIQNRDWGDRNKTYYCQTLGTQRYFLYGTHSTAQNINDIKLQE |
| | LIPLTNTQDYVQGFDWTEKDKHNITTYKEFLTKGAGNPFHAEWITAQN |
| | PVIHTANSPTQIEQIYTASTTTFQNKKLTDLPTPGYIFITPTVSLRYNPYK |
| | DLAERNKCYFVRSKINAHGWDPEQHQELINSDLPQWLLLFGYPDYIKR |
| | TQNFALVDTNYILVDHCPYTNPEKTPFIPLSTSFIEGRSPYSPSDTHEPDE |
| | EDQNRWYPCYQYQQESINSICLSGPGTPKIPKGITAEAKVKYSFNFKWG |
| | GDLPPMSTITNPTDQPTYVVPNNFNETTSLQNPTTRPEHFLYSFDERRGQ |
| | LTEKATKRLLKDWETKETSLLSTEYRFAEPTQTQAPQEDPSSEEEEESNL |
| | FERLLRQRTKQLQLKRRIIQTLKDLQKLE (SEQ ID NO: 2545) |
| 25. Ring10 | MIVEWQPKSIRKCRIKGMLCLFQTTEDRLSYNFDMYEESIIPEKLPGGGG |
| delARM | FSIKNISLYALYQEHIHAHNIFTHTNTDRPLARYTGCSLKFYQSKDIDYV |
| delCterm | VTYSTSLPLRSSMGMYNSMQPSIHLMQQNKLIVPSKQTQKRRKPYIKK |
| (Δ2- | HISPPTQMKSQWYFQHNIANIPLLMIRTTALTLDNYYIGSRQLSTNVTIH |
| 51 + Δ542- | TLNTTYIQNRDWGDRNKTYYCQTLGTQRYFLYGTHSTAQNINDIKLQE |
| 672)(5150) | LIPLTNTQDYVQGFDWTEKDKHNITTYKEFLTKGAGNPFHAEWITAQN |
| | PVIHTANSPTQIEQIYTASTTTFQNKKLTDLPTPGYIFITPTVSLRYNPYK |
| | DLAERNKCYFVRSKINAHGWDPEQHQELINSDLPQWLLLFGYPDYIKR |
| | TQNFALVDTNYILVDHCPYTNPEKTPFIPLSTSFIEGRSPYSPSDTHEPDE |
| | EDQNRWYPCYQYQQESINSICLSGPGTPKIPKGITAEAKVKYSFNFK |
| | (SEQ ID NO: 2546) |
| 26. Ring10 | MIVEWQPKSIRKCRIKGMLCLFQTTEDRLSYNFDMYEESIIPEKLPGGGG |
| delARM | FSIKNISLYALYQEHIHAHNIFTHTNTDRPLARYTGCSLKFYQSKDIDYV |
| delCterm | VTYSTSLPLRSSMGMYNSMQPSIHLMQQNKLIVPSKQTQKRRKPYIKK |
| (Δ2- | HISPPTQMKSQWYFQHNIANIPLLMIRTTALTLDNYYIGSRQLSTNVTIH |
| 51 + Δ552- | TLNTTYIQNRDWGDRNKTYYCQTLGTQRYFLYGTHSTAQNINDIKLQE |
| 672) | LIPLTNTQDYVQGFDWTEKDKHNITTYKEFLTKGAGNPFHAEWITAQN |
| (5151) | PVIHTANSPTQIEQIYTASTTTFQNKKLTDLPTPGYIFITPTVSLRYNPYK |
| | DLAERNKCYFVRSKINAHGWDPEQHQELINSDLPQWLLLFGYPDYIKR |
| | TQNFALVDTNYILVDHCPYTNPEKTPFIPLSTSFIEGRSPYSPSDTHEPDE |
| | EDQNRWYPCYQYQQESINSICLSGPGTPKIPKGITAEAKVKYSFNFKWG |
| | GDLPPMST (SEQ ID NO: 2547) |

TABLE B1-10
Ring18 delARM/C-terminal deletion constructs

| #ID | Sequence |
|---|---|
| 27. Ring18 | MAWGFWGRRRRWRRWRPRRRRWRPRRRRRRRPARRFRARRRVRRR |
| delCterm | GGRWRRRYRKWRRGRRRRTHRKKIVIKQWQPNFIRRCYIIGYLPLIFCG |
| (Δ651-736) | ENTTAQNYATHSDDMISKGPYGGGMTTTKFTLRILYDEFTRFMNFWTV |
| (5152) | SNEDLDLCRYVGCKLIFFKHPTVDFIVQINTQPPFLDTHLTAASIHPGIM |
| | MLSKRRILIPSLKTRPSRKHRVVVRVGAPRLFQDKWYPQSDLCDTVLLS |
| | IFATACDLQYPFGSPLTDNPCVNFQILGPQYKKHLSISSTMDTTNKQHY |
| | DSNLFNQTQLYNTFQTIAQLKETGQTANISPSWSAVQNNMALSNTGEN |
| | ATQSKDTWYKGNTYNNHITTLAQKTRERFKGATKAALQNYPTIMSTDL |
| | YEYHSGIYSSIFLSAGRSYFETTGAYSDIIYNPFTDKGTGNIIWIDYLTKE |
| | DTIFVKNKSKCEIMDMPLWAACTGYTEFCAKYTGDSAIIYNARVLIRCP |
| | YTEPMLIDHSDPNKGFVPYSFNFGNGKMPGGSSNVPIRMRAKWYVNIF |
| | HQKEVLETIVQSGPFGYKGDIKSAVLAMKYRFHWKWGGNPISKQVVR |
| | NPCSNSSSSAAHRGPRSVQAVDPKYNTPEVTWHSWDIRRGLFGKAGIK |
| | RMQQESDALYIPPGPFKRPRR (SEQ ID NO: 2548) |
| 28. Ring18 | MAWGFWGRRRRWRRWRPRRRRWRPRRRRRRRPARRFRARRRVRRR |
| delCterm | GGRWRRRYRKWRRGRRRRTHRKKIVIKQWQPNFIRRCYIIGYLPLIFCG |
| (Δ582-736) | ENTTAQNYATHSDDMISKGPYGGGMTTTKFTLRILYDEFTRFMNFWTV |
| (5153) | SNEDLDLCRYVGCKLIFFKHPTVDFIVQINTQPPFLDTHLTAASIHPGIM |
| | MLSKRRILIPSLKTRPSRKHRVVVRVGAPRLFQDKWYPQSDLCDTVLLS |
| | IFATACDLQYPFGSPLTDNPCVNFQILGPQYKKHLSISSTMDTTNKQHY |
| | DSNLFNQTQLYNTFQTIAQLKETGQTANISPSWSAVQNNMALSNTGEN |
| | ATQSKDTWYKGNTYNNHITTLAQKTRERFKGATKAALQNYPTIMSTDL |
| | YEYHSGIYSSIFLSAGRSYFETTGAYSDIIYNPFTDKGTGNIIWIDYLTKE |
| | DTIFVKNKSKCEIMDMPLWAACTGYTEFCAKYTGDSAIIYNARVLIRCP |
| | YTEPMLIDHSDPNKGFVPYSFNFGNGKMPGGSSNVPIRMRAKWYVNIF |
| | HQKEVLETIVQSGPFGYKGDIKSAVLAMKYRFHWKWGGNPISKQVVR |
| | (SEQ ID NO: 2549) |
| 29. Ring18 | MVIKQWQPNFIRRCYIIGYLPLIFCGENTTAQNYATHSDDMISKGPYGG |
| delARM | GMTTTKFTLRILYDEFTRFMNFWTVSNEDLDLCRYVGCKLIFFKHPTVD |
| delCterm | FIVQINTQPPFLDTHLTAASIHPGIMMLSKRRILIPSLKTRPSRKHRVVVR |
| (Δ 2-69 + | VGAPRLFQDKWYPQSDLCDTVLLSIFATACDLQYPFGSPLTDNPCVNFQ |
| Δ651-736) | ILGPQYKKHLSISSTMDTTNKQHYDSNLFNQTQLYNTFQTIAQLKETGQ |
| (5154) | TANISPSWSAVQNNMALSNTGENATQSKDTWYKGNTYNNHITTLAQK |
| | TRERFKGATKAALQNYPTIMSTDLYEYHSGIYSSIFLSAGRSYFETTGAY |
| | SDIIYNPFTDKGTGNIIWIDYLTKEDTIFVKNKSKCEIMDMPLWAACTGY |
| | TEFCAKYTGDSAIIYNARVLIRCPYTEPMLIDHSDPNKGFVPYSFNFGNG |
| | KMPGGSSNVPIRMRAKWYVNIFHQKEVLETIVQSGPFGYKGDIKSAVL |
| | AMKYRFHWKWGGNPISKQVVRNPCSNSSSSAAHRGPRSVQAVDPKYN |
| | TPEVTWHSWDIRRGLFGKAGIKRMQQESDALYIPPGPFKRPRR (SEQ ID |
| | NO: 2550) |
| 30. Ring18 | MVIKQWQPNFIRRCYIIGYLPLIFCGENTTAQNYATHSDDMISKGPYGG |
| delARM | GMTTTKFTLRILYDEFTRFMNFWTVSNEDLDLCRYVGCKLIFFKHPTVD |
| delCterm | FIVQINTQPPFLDTHLTAASIHPGIMMLSKRRILIPSLKTRPSRKHRVVVR |
| (Δ 2-69 + | VGAPRLFQDKWYPQSDLCDTVLLSIFATACDLQYPFGSPLTDNPCVNFQ |
| Δ582-736) | ILGPQYKKHLSISSTMDTTNKQHYDSNLFNQTQLYNTFQTIAQLKETGQ |
| (5155) | TANISPSWSAVQNNMALSNTGENATQSKDTWYKGNTYNNHITTLAQK |
| | TRERFKGATKAALQNYPTIMSTDLYEYHSGIYSSIFLSAGRSYFETTGAY |
| | SDIIYNPFTDKGTGNIIWIDYLTKEDTIFVKNKSKCEIMDMPLWAACTGY |
| | TEFCAKYTGDSAIIYNARVLIRCPYTEPMLIDHSDPNKGFVPYSFNFGNG |
| | KMPGGSSNVPIRMRAKWYVNIFHQKEVLETIVQSGPFGYKGDIKSAVL |
| | AMKYRFHWKWGGNPISKQVVR (SEQ ID NO: 2551) |

TABLE B1-13b
Ring19 constructs suitable for expression in 293 cells

| #ID | Sequence |
|---|---|
| 31. Ring19 | MPWYPRRRYPRRRYRWLRRWRARRPFRPRYRRRYWVRNYSRKRKLF |
| delCterm | KITTKEWQPKVIRKTHVKGTYPLFLCTKHRINNNMIQYLDSIAPEHYYG |
| (Δ600-655) | GGGFSIMQFSLQALYEEFIKAKNWWTNTNCFLPLVRYMGCSFKFYKTE |
| (7120) | FYDYIVLIERCYPLACTDEMYLSTQPSIMMLTRKCIFVPCKQNSKGKKP |
| | YKKVRVRPPSQMTTGWHFSQDLANMPLVVLKTSVCSFDRYYTDSTAK |
| | STTIGFKTLNTQTFRYHDWQEPPTTGYKPQNLLWFYGAENGSPVDPNN |
| | TIVSNLIYLGGTGPYEKGTPIKTNISNYFSEPKLWGNIFHDDYTSGTSPVF |
| | VTNKSPSEIKTAWNTIKDLTVKASGVFTLRTIPLWLPCRYNPFADKATN |
| | NKIWLVSIHSDHTEWKPIDNPLLQRTDLPLWLLVWGWQDWQKKNQQT |
| | SQPDINYLTVISSPYISCYPKLDYYVLLDEGFWEGHSTYIESITDSDKKH |
| | WYPKNRFQIETLNLIANTGPGTVKLRENQAAEGHMVYRFNFKLGGCPA |
| | PMEKICDPSKQSKYPIPNNQQQTTSLQSPENPIQTYLYDFDERRGLLTER |
| | ATKRIKQDHTSEKTVLP (SEQ ID NO: 2552) |
| 32. Ring19 | MPWYPRRRYPRRRYRWLRRWRARRPFRPRYRRRYWVRNYSRKRKLF |
| delCterm | KITTKEWQPKVIRKTHVKGTYPLFLCTKHRINNNMIQYLDSIAPEHYYG |
| (Δ583-655) | GGGFSIMQFSLQALYEEFIKAKNWWTNTNCFLPLVRYMGCSFKFYKTE |
| (7121) | FYDYIVLIERCYPLACTDEMYLSTQPSIMMLTRKCIFVPCKQNSKGKKP |
| | YKKVRVRPPSQMTTGWHFSQDLANMPLVVLKTSVCSFDRYYTDSTAK |
| | STTIGFKTLNTQTFRYHDWQEPPTTGYKPQNLLWFYGAENGSPVDPNN |
| | TIVSNLIYLGGTGPYEKGTPIKTNISNYFSEPKLWGNIFHDDYTSGTSPVF |
| | VTNKSPSEIKTAWNTIKDLTVKASGVFTLRTIPLWLPCRYNPFADKATN |
| | NKIWLVSIHSDHTEWKPIDNPLLQRTDLPLWLLVWGWQDWQKKNQQT |
| | SQPDINYLTVISSPYISCYPKLDYYVLLDEGFWEGHSTYIESITDSDKKH |
| | WYPKNRFQIETLNLIANTGPGTVKLRENQAAEGHMVYRFNFKLGGCPA |
| | PMEKICDPSKQSKYPIPNNQQQTTSLQSPENPIQTYLYDFDERRGLLTER |
| | (SEQ ID NO: 2553) |

TABLE B1-14
Ring19 delARM/C-terminal deletion: Baculovirus constructs

| #ID | Sequence |
|---|---|
| 33. Ring19 | MTKEWQPKVIRKTHVKGTYPLFLCTKHRINNNMIQYLDSIAPEHYYGG |
| delARM | GGFSIMQFSLQALYEEFIKAKNWWTNTNCFLPLVRYMGCSFKFYKTEF |
| (Δ2-49) | YDYIVLIERCYPLACTDEMYLSTQPSIMMLTRKCIFVPCKQNSKGKKPY |
| (5146) | KKVRVRPPSQMTTGWHFSQDLANMPLVVLKTSVCSFDRYYTDSTAKS |
| | TTIGFKTLNTQTFRYHDWQEPPTTGYKPQNLLWFYGAENGSPVDPNNTI |
| | VSNLIYLGGTGPYEKGTPIKTNISNYFSEPKLWGNIFHDDYTSGTSPVFV |
| | TNKSPSEIKTAWNTIKDLTVKASGVFTLRTIPLWLPCRYNPFADKATNN |
| | KIWLVSIHSDHTEWKPIDNPLLQRTDLPLWLLVWGWQDWQKKNQQTS |
| | QPDINYLTVISSPYISCYPKLDYYVLLDEGFWEGHSTYIESITDSDKKHW |
| | YPKNRFQIETLNLIANTGPGTVKLRENQAAEGHMVYRFNFKLGGCPAP |
| | MEKICDPSKQSKYPIPNNQQQTTSLQSPENPIQTYLYDFDERRGLLTERA |
| | TKRIKQDHTSEKTVLPFTGAATDLPILQTTSQEESSSEEEEEQQAEKKLL |
| | QLRRKQHRLRERILQLLDIQNT (SEQ ID NO: 2554) |
| 34. Ring19 | MTKEWQPKVIRKTHVKGTYPLFLCTKHRINNNMIQYLDSIAPEHYYGG |
| delARM | GGFSIMQFSLQALYEEFIKAKNWWTNTNCFLPLVRYMGCSFKFYKTEF |
| dCterm | YDYIVLIERCYPLACTDEMYLSTQPSIMMLTRKCIFVPCKQNSKGKKPY |
| (Δ2-49 + | KKVRVRPPSQMTTGWHFSQDLANMPLVVLKTSVCSFDRYYTDSTAKS |
| Δ537-655) | TTIGFKTLNTQTFRYHDWQEPPTTGYKPQNLLWFYGAENGSPVDPNNTI |
| (5147) | VSNLIYLGGTGPYEKGTPIKTNISNYFSEPKLWGNIFHDDYTSGTSPVFV |
| | TNKSPSEIKTAWNTIKDLTVKASGVFTLRTIPLWLPCRYNPFADKATNN |
| | KIWLVSIHSDHTEWKPIDNPLLQRTDLPLWLLVWGWQDWQKKNQQTS |
| | QPDINYLTVISSPYISCYPKLDYYVLLDEGFWEGHSTYIESITDSDKKHW |
| | YPKNRFQIETLNLIANTGPGTVKLRENQAAEGHMVYRFNFKLGGCPAP |
| | MEK (SEQ ID NO: 2555) |
| 35. Ring19 | MTKEWQPKVIRKTHVKGTYPLFLCTKHRINNNMIQYLDSIAPEHYYGG |
| delARM | GGFSIMQFSLQALYEEFIKAKNWWTNTNCFLPLVRYMGCSFKFYKTEF |
| delCterm | YDYIVLIERCYPLACTDEMYLSTQPSIMMLTRKCIFVPCKQNSKGKKPY |
| (Δ2-49 + | KKVRVRPPSQMTTGWHFSQDLANMPLVVLKTSVCSFDRYYTDSTAKS |
| Δ527-655) | TTIGFKTLNTQTFRYHDWQEPPTTGYKPQNLLWFYGAENGSPVDPNNTI |
| (5148) | VSNLIYLGGTGPYEKGTPIKTNISNYFSEPKLWGNIFHDDYTSGTSPVFV |
| | TNKSPSEIKTAWNTIKDLTVKASGVFTLRTIPLWLPCRYNPFADKATNN |
| | KIWLVSIHSDHTEWKPIDNPLLQRTDLPLWLLVWGWQDWQKKNQQTS |
| | QPDINYLTVISSPYISCYPKLDYYVLLDEGFWEGHSTYIESITDSDKKHW |
| | YPKNRFQIETLNLIANTGPGTVKLRENQAAEGHMVYRFNFK (SEQ ID |
| | NO: 2556) |

TABLE B2-1
Ring2 cysteine deletion

| | |
|---|---|
| 1. Ring2-ORF1 | MLKQWQPPYKRTSYIKGQDSLIYYSNLRLGMNSTMYEKSIVPV |
| delARM (Δ2-45) + | HWPGGGSFSVSMLTLDALYDIHKLSRNWWTSTNQDLPLVRYK |
| All Cysteine to | GSKITFYQSTFTDYIVRIHTELPANSNKLTYPNTHPLMMMMSK |
| Serine (C57S, C64S, | YKHIIPSRQTRRKKKPYTKIFVKPPPQFENKWYFATDLYKIPLL |
| C112S, C131S, | QIHSTASNLQNPFVKPDKLSNNVTLWSLNTISIQNRNMSVDQG |
| C220S, C223S, | QSWPFKILGTQSFYFYFYTGANLPGDTTQIPVADLLPLTNPRIN |
| C626S) | RPGQSLNEAKITDHITFTEYKNKFTNYWGNPFNKHIQEHLDMIL |
| (SB-7078/pRTx- | YSLKSPEAIKNEWTTENMKWNQLNNAGTMALTPFNEPIFTQIQ |
| 2683) | YNPDRDTGEDTQLYLLSNATGTGWDPPGIPELILEGFPLWLIY |
| | WGFADFQKNLKKVTNIDTNYMLVAKTKFTQKPGTFYLVILND |
| | TFVEGNSPYEKQPLPEDNIKWYPQVQYQLEAQNKLLQTGPFTP |
| | NIQGQLSDNISMFYKFYFKWGGSPPKAINVENPAHQIQYPIPRN |
| | EHETTSLQSPGEAPESILYSFDYRHGNYTTTALSRISQDWALKD |
| | TVSKITEPDRQQLLKQALESLQISEETQEKKEKEVQQLISNLRQ |
| | QQQLYRERIISLLKDQ (SEQ ID NO: 2557) |

TABLE B2-2
Ring10 cysteine deletion with surface moiety grafting

| #ID | Sequence |
|---|---|
| 2. Ring10-ORF1 | MIVEWQPKSIRKSRIKGMLSLFQTTEDRLSYNFDMYEESIIPEK |
| delARM (Δ2-51) + | LPGGGGFSIKNISLYALYQEHIHAHNIFTHTNTDRPLARYTGSS |
| All Cysteine to | LKFYQSKDIDYVVTYSTSLPLRSSMGMYNSMQPSIHLMQQNK |
| Serine (C63S, C70S, | LIVPSKQTQKRRKPYIKKHISPPTQMKSQWYFQHNIANIPLLMI |
| C137S, C269S, | RTTALTLDNYYIGSRQLSTNVTIHTLNTTYIQNRDWGDRNKTY |
| C403S, C460S, | YSQTLGTQRYFLYGTHSTAQNINDIKLQELIPLINTQDYVQGF |
| C503S, C515S) | DWTEKDKHNITTYKEFLTKGAGNPFHAEWITAQNPVIHTANSP |
| (SB-7079/pRTx- | TQIEQIYTASTTTFQNKKLTDLPTPGYIFITPTVSLRYNPYKDLA |
| 2684) | ERNKSYFVRSKINAHGWDPEQHQELINSDLPQWLLLFGYPDYI |
| | KRTQNFALVDTNYILVDHSPYTNPEKTPFIPLSTSFIEGRSPYSP |
| | SDTHEPDEEDQNRWYPSYQYQQESINSISLSGPGTPKIPKGITAE |
| | AKVKYSFNFKWGGDLPPMSTITNPTDQPTYVVPNNFNETTSLQ |
| | NPTTRPEHFLYSFDERRGQLTEKATKRLLKDWETKETSLLSTE |
| | YRFAEPTQTQAPQEDPSSEEEEESNLFERLLRQRTKQLQLKRRII |
| | QTLKDLQKLE (SEQ ID NO: 2558) |
| 3. Ring10-ORF1 | MIVEWQPKSIRKARIKGMLSLFQTTEDRLSYNFDMYEESIIPEK |
| delARM (Δ2-51) + | LPGGGGFSIKNISLYALYQEHIHAHNIFTHTNTDRPLARYTGAS |
| Buried Cysteines to | LKFYQSKDIDYVVTYSTSLPLRSSMGMYNSMQPSIHLMQQNK |
| Alanines (C63A, | LIVPSKQTQKRRKPYIKKHISPPTQMKSQWYFQHNIANIPLLMI |
| C137A, C269A, | RTTALTLDNYYIGSRQLSTNVTIHTLNTTYIQNRDWGDRNKTY |
| C403A, C460A, | YAQTLGTQRYFLYGTHSTAQNINDIKLQELIPLTNTQDYVQGF |
| C503A, C515A) + | DWTEKDKHNITTYKEFLTKGAGNPFHAEWITAQNPVIHTANSP |
| Exposed Cysteines to | TQIEQIYTASTTTFQNKKLTDLPTPGYIFITPTVSLRYNPYKDLA |
| Serine (C70S) | ERNKAYFVRSKINAHGWDPEQHQELINSDLPQWLLLFGYPDYI |
| (SB-7082/pRTx- | KRTQNFALVDTNYILVDHAPYTNPEKTPFIPLSTSFIEGRSPYSP |
| 2687) | SDTHEPDEEDQNRWYPAYQYQQESINSIALSGPGTPKIPKGITA |
| | EAKVKYSFNFKWGGDLPPMSTITNPTDQPTYVVPNNFNETTSL |
| | QNPTTRPEHFLYSFDERRGQLTEKATKRLLKDWETKETSLLST |
| | EYRFAEPTQTQAPQEDPSSEEEEESNLFERLLRQRTKQLQLKRR |
| | IIQTLKDLQKLE (SEQ ID NO: 2559) |

TABLE B2-3
Ring10 delARM grafting with free cysteine on P2 domain

| #ID | Sequence |
|---|---|
| 4. Ring10-ORF1 | MIVEWQPKSIRKARIKGMLSLFQTTEDRLSYNFDMYEESIIPEK |
| delARM (Δ2-51) + | LPGGGGFSIKNISLYALYQEHIHAHNIFTHTNTDRPLARYTGAS |
| Buried Cysteines to | LKFYQSKDIDYVVTYSTSLPLRSSMGMYNSMQPSIHLMQQNK |
| Alanines (C63A, | LIVPSKQTQKRRKPYIKKHISPPTQMKSQWYFQHNIANIPLLMI |
| C137A, C269A, | RTTALTLDNYYIGSRQLSTNVTIHTLNTTYIQNRDWGDRNKTY |
| C403A, C460A, | YAQTLGTQRYFLYGTHSTAQNINDIKLQELIPLTNTQDYVQGF |
| C503A, C515A) + | DWTEKDKHNITTYKEFLTKGAGNPFHAEWITAQNPVIHTANSP |
| Exposed Cysteines to | TQIEQIYTASTCTFQNKKLTDLPTPGYIFITPTVSLRYNPYKDLA |
| Serine (C70S) + | ERNKAYFVRSKINAHGWDPEQHQELINSDLPQWLLLFGYPDYI |
| P2 Cysteine for | KRTQNFALVDTNYILVDHAPYTNPEKTPFIPLSTSFIEGRSPYSP |
| conjugation (T365C) | SDTHEPDEEDQNRWYPAYQYQQESINSIALSGPGTPKIPKGITA |
| (SB-7085/pRTx- | EAKVKYSFNFKWGGDLPPMSTITNPTDQPTYVVPNNFNETTSL |
| 2690) | QNPTTRPEHFLYSFDERRGQLTEKATKRLLKDWETKETSLLST |
| | EYRFAEPTQTQAPQEDPSSEEEEESNLFERLLRQRTKQLQLKRR |
| | IIQTLKDLQKLE (SEQ ID NO: 2560) |
| 5. Ring10-ORF1 | MIVEWQPKSIRKSRIKGMLSLFQTTEDRLSYNFDMYEESIIPEK |
| delARM (Δ2-51) + | LPGGGGFSIKNISLYALYQEHIHAHNIFTHTNTDRPLARYTGSS |
| All Cysteine to Serine | LKFYQSKDIDYVVTYSTSLPLRSSMGMYNSMQPSIHLMQQNK |
| (C63S, C70S, C137S, | LIVPSKQTQKRRKPYIKKHISPPTQMKSQWYFQHNIANIPLLMI |
| C269S, C403S, | RTTALTLDNYYIGSRQLSTNVTIHTLNTTYIQNRDWGDRNKTY |
| C460S, C503S, | YSQTLGTQRYFLYGTHSTAQNINDIKLQELIPLTNTQDYVQGF |
| C515S) + | DWTEKDKHNITTYKEFLTKGAGNPFHAEWITAQNPVIHTANSP |
| P2 Cysteine for | TQIEQIYTASTCTFQNKKLTDLPTPGYIFITPTVSLRYNPYKDLA |
| conjugation (T365C) | ERNKSYFVRSKINAHGWDPEQHQELINSDLPQWLLLFGYPDYI |
| | KRTQNFALVDTNYILVDHSPYTNPEKTPFIPLSTSFIEGRSPYSP |
| | SDTHEPDEEDQNRWYPSYQYQQESINSISLSGPGTPKIPKGITA |
| | EAKVKYSFNFKWGGDLPPMSTITNPTDQPTYVVPNNFNETTSL |
| | QNPTTRPEHFLYSFDERRGQLTEKATKRLLKDWETKETSLLST |
| | EYRFAEPTQTQAPQEDPSSEEEEESNLFERLLRQRTKQLQLKRR |
| | IIQTLKDLQKLE (SEQ ID NO: 2561) |
| 6. Ring10-ORF1 | MIVEWQPKSIRKSRIKGMLSLFQTTEDRLSYNFDMYEESIIPEK |
| delARM (Δ2-51) + | LPGGGGFSIKNISLYALYQEHIHAHNIFTHTNTDRPLARYTGSS |
| All Cysteine to Serine | LKFYQSKDIDYVVTYSTSLPLRSSMGMYNSMQPSIHLMQQNK |
| (C63S, C70S, C137S, | LIVPSKQTQKRRKPYIKKHISPPTQMKSQWYFQHNIANIPLLMI |
| C269S, C403S, | RTTALTLDNYYIGSRQLSTNVTIHTLNTTYIQNRDWGDRNKTY |
| C460S, C503S, | YSQTLGTQRYFLYGTHCTAQNINDIKLQELIPLTNTQDYVQGF |
| C515S) + | DWTEKDKHNITTYKEFLTKGAGNPFHAEWITAQNPVIHTANSP |
| P2 Cysteine for | TQIEQIYTASTTTFQNKKLTDLPTPGYIFITPTVSLRYNPYKDLA |
| conjugation (S284C) | ERNKSYFVRSKINAHGWDPEQHQELINSDLPQWLLLFGYPDYI |
| | KRTQNFALVDTNYILVDHSPYTNPEKTPFIPLSTSFIEGRSPYSP |
| | SDTHEPDEEDQNRWYPSYQYQQESINSISLSGPGTPKIPKGITA |
| | EAKVKYSFNFKWGGDLPPMSTITNPTDQPTYVVPNNFNETTSL |
| | QNPTTRPEHFLYSFDERRGQLTEKATKRLLKDWETKETSLLST |
| | EYRFAEPTQTQAPQEDPSSEEEEESNLFERLLRQRTKQLQLKRR |
| | IIQTLKDLQKLE (SEQ ID NO: 2562) |
| 6. Ring10-ORF1 | MIVEWQPKSIRKSRIKGMLSLFQTTEDRLSYNFDMYEESIIPEK |
| delARM (Δ2-51) + | LPGGGGFSIKNISLYALYQEHIHAHNIFTHTNTDRPLARYTGSS |
| All Cysteine to Serine | LKFYQSKDIDYVVTYSTSLPLRSSMGMYNSMQPSIHLMQQNK |
| (C63S, C70S, C137S, | LIVPSKQTQKRRKPYIKKHISPPTQMKSQWYFQHNIANIPLLMI |
| C269S, C403S, | RTTALTLDNYYIGSRQLSTNVTIHTLNTTYIQNRDWGDRNKTY |
| C460S, C503S, | YSQTLGTQRYFLYGTHSTAQNICDIKLQELIPLTNTQDYVQGF |
| C515S) + | DWTEKDKHNITTYKEFLTKGAGNPFHAEWITAQNPVIHTANSP |
| P2 Cysteine for | TQIEQIYTASTTTFQNKKLTDLPTPGYIFITPTVSLRYNPYKDLA |
| conjugation (N290C) | ERNKSYFVRSKINAHGWDPEQHQELINSDLPQWLLLFGYPDYI |
| | KRTQNFALVDTNYILVDHSPYTNPEKTPFIPLSTSFIEGRSPYSP |
| | SDTHEPDEEDQNRWYPSYQYQQESINSISLSGPGTPKIPKGITA |
| | EAKVKYSFNFKWGGDLPPMSTITNPTDQPTYVVPNNFNETTSL |
| | QNPTTRPEHFLYSFDERRGQLTEKATKRLLKDWETKETSLLST |
| | EYRFAEPTQTQAPQEDPSSEEEEESNLFERLLRQRTKQLQLKRR |
| | IIQTLKDLQKLE (SEQ ID NO: 2563) |
| 8. Ring10-ORF1 | MIVEWQPKSIRKSRIKGMLSLFQTTEDRLSYNFDMYEESIIPEK |
| delARM (Δ2-51) + | LPGGGGFSIKNISLYALYQEHIHAHNIFTHTNTDRPLARYTGSS |
| All Cysteine to Serine | LKFYQSKDIDYVVTYSTSLPLRSSMGMYNSMQPSIHLMQQNK |
| (C63S, C70S, C137S, | LIVPSKQTQKRRKPYIKKHISPPTQMKSQWYFQHNIANIPLLMI |
| C269S, C403S, | RTTALTLDNYYIGSRQLSTNVTIHTLNTTYIQNRDWGDRNKTY |
| C460S, C503S, | YSQTLGTQRYFLYGTHSTAQNINDIKLQELIPLINTQDYVQGF |
| C515S) + | DWTEKDCHNITTYKEFLTKGAGNPFHAEWITAQNPVIHTANSP |
| P2 Cysteine for | TQIEQIYTASTTTFQNKKLTDLPTPGYIFITPTVSLRYNPYKDLA |
| conjugation (K317C) | ERNKSYFVRSKINAHGWDPEQHQELINSDLPQWLLLFGYPDYI |
| | KRTQNFALVDTNYILVDHSPYTNPEKTPFIPLSTSFIEGRSPYSP |
| | SDTHEPDEEDQNRWYPSYQYQQESINSISLSGPGTPKIPKGITA |
| | EAKVKYSFNFKWGGDLPPMSTITNPTDQPTYVVPNNFNETTSL |
| | QNPTTRPEHFLYSFDERRGQLTEKATKRLLKDWETKETSLLST |
| | EYRFAEPTQTQAPQEDPSSEEEEESNLFERLLRQRTKQLQLKRR |
| | IIQTLKDLQKLE (SEQ ID NO: 2564) |
| 9. Ring10-ORF1 | MIVEWQPKSIRKSRIKGMLSLFQTTEDRLSYNFDMYEESIIPEK |
| delARM (Δ2-51) + | LPGGGGFSIKNISLYALYQEHIHAHNIFTHTNTDRPLARYTGSS |
| All Cysteine to Serine | LKFYQSKDIDYVVTYSTSLPLRSSMGMYNSMQPSIHLMQQNK |
| (C63S, C70S, C137S, | LIVPSKQTQKRRKPYIKKHISPPTQMKSQWYFQHNIANIPLLMI |
| C269S, C403S, | RTTALTLDNYYIGSRQLSTNVTIHTLNTTYIQNRDWGDRNKTY |
| C460S, C503S, | YSQTLGTQRYFLYGTHSTAQNINDIKLQELIPLINTQDYVQGF |
| C515S) + | DWTEKDKHNITTYCEFLTKGAGNPFHAEWITAQNPVIHTANSP |
| P2 Cysteine for | TQIEQIYTASTTTFQNKKLTDLPTPGYIFITPTVSLRYNPYKDLA |
| conjugation (K324C) | ERNKSYFVRSKINAHGWDPEQHQELINSDLPQWLLLFGYPDYI |
| | KRTQNFALVDTNYILVDHSPYTNPEKTPFIPLSTSFIEGRSPYSP |
| | SDTHEPDEEDQNRWYPSYQYQQESINSISLSGPGTPKIPKGITA |
| | EAKVKYSFNFKWGGDLPPMSTITNPTDQPTYVVPNNFNETTSL |
| | QNPTTRPEHFLYSFDERRGQLTEKATKRLLKDWETKETSLLST |
| | EYRFAEPTQTQAPQEDPSSEEEEESNLFERLLRQRTKQLQLKRR |
| | IIQTLKDLQKLE (SEQ ID NO: 2565) |
| 10. Ring10-ORF1 | MIVEWQPKSIRKSRIKGMLSLFQTTEDRLSYNFDMYEESIIPEK |
| delARM (Δ2-51) + | LPGGGGFSIKNISLYALYQEHIHAHNIFTHTNTDRPLARYTGSS |
| All Cysteine to Serine | LKFYQSKDIDYVVTYSTSLPLRSSMGMYNSMQPSIHLMQQNK |
| (C63S, C70S, C137S, | LIVPSKQTQKRRKPYIKKHISPPTQMKSQWYFQHNIANIPLLMI |
| C269S, C403S, | RTTALTLDNYYIGSRQLSTNVTIHTLNTTYIQNRDWGDRNKTY |
| C460S, C503S, | YSQTLGTQRYFLYGTHSTAQNINDIKLQELIPLTNTQDYVQGF |
| C515S) + | DWTEKDKHNITTYKEFLTKGAGNPFHAEWITAQNPVIHTANSP |
| P2 Cysteine for | TQIEQIYTCSTTTFQNKKLTDLPTPGYIFITPTVSLRYNPYKDLA |
| conjugation (A362C) | ERNKSYFVRSKINAHGWDPEQHQELINSDLPQWLLLFGYPDYI |
| | KRTQNFALVDTNYILVDHSPYTNPEKTPFIPLSTSFIEGRSPYSP |
| | SDTHEPDEEDQNRWYPSYQYQQESINSISLSGPGTPKIPKGITA |
| | EAKVKYSFNFKWGGDLPPMSTITNPTDQPTYVVPNNFNETTSL |
| | QNPTTRPEHFLYSFDERRGQLTEKATKRLLKDWETKETSLLST |
| | EYRFAEPTQTQAPQEDPSSEEEEESNLFERLLRQRTKQLQLKRR |
| | IIQTLKDLQKLE (SEQ ID NO: 2566) |
| 11. Ring10-ORF1 | MIVEWQPKSIRKSRIKGMLSLFQTTEDRLSYNFDMYEESIIPEK |
| delARM (Δ2-51) + | LPGGGGFSIKNISLYALYQEHIHAHNIFTHTNTDRPLARYTGSS |
| All Cysteine to Serine | LKFYQSKDIDYVVTYSTSLPLRSSMGMYNSMQPSIHLMQQNK |
| (C63S, C70S, C137S, | LIVPSKQTQKRRKPYIKKHISPPTQMKSQWYFQHNIANIPLLMI |
| C269S, C403S, | RTTALTLDNYYIGSRQLSTNVTIHTLNTTYIQNRDWGDRNKTY |
| C460S, C503S, | YSQTLGTQRYFLYGTHSTAQNINDIKLQELIPLTNTQDYVQGF |
| C515S) + | DWTEKDKHNITTYKEFLTKGAGNPFHAEWITAQNPVIHTANSP |
| P2 Cysteine for | TQIEQIYTACTTTFQNKKLTDLPTPGYIFITPTVSLRYNPYKDLA |
| conjugation (S363C) | ERNKSYFVRSKINAHGWDPEQHQELINSDLPQWLLLFGYPDYI |
| | KRTQNFALVDTNYILVDHSPYTNPEKTPFIPLSTSFIEGRSPYSP |
| | SDTHEPDEEDQNRWYPSYQYQQESINSISLSGPGTPKIPKGITA |
| | EAKVKYSFNFKWGGDLPPMSTITNPTDQPTYVVPNNFNETTSL |
| | QNPTTRPEHFLYSFDERRGQLTEKATKRLLKDWETKETSLLST |
| | EYRFAEPTQTQAPQEDPSSEEEEESNLFERLLRQRTKQLQLKRR |
| | IIQTLKDLQKLE (SEQ ID NO: 2567) |
| 12. Ring10-ORF1 | MIVEWQPKSIRKSRIKGMLSLFQTTEDRLSYNFDMYEESIIPEK |
| delARM (Δ2-51) + | LPGGGGFSIKNISLYALYQEHIHAHNIFTHTNTDRPLARYTGSS |
| All Cysteine to Serine | LKFYQSKDIDYVVTYSTSLPLRSSMGMYNSMQPSIHLMQQNK |
| (C63S, C70S, C137S, | LIVPSKQTQKRRKPYIKKHISPPTQMKSQWYFQHNIANIPLLMI |
| C269S, C403S, | RTTALTLDNYYIGSRQLSTNVTIHTLNTTYIQNRDWGDRNKTY |
| C460S, C503S, | YSQTLGTQRYFLYGTHSTAQNINDIKLQELIPLINTQDYVQGF |
| C515S) + | DWTEKDKHNITTYKEFLTKGAGNPFHAEWITAQNPVIHTANSP |
| P2 Cysteine for | TQIEQIYTASTTTFQCKKLTDLPTPGYIFITPTVSLRYNPYKDLA |
| conjugation (N369C) | ERNKSYFVRSKINAHGWDPEQHQELINSDLPQWLLLFGYPDYI |
| | KRTQNFALVDTNYILVDHSPYTNPEKTPFIPLSTSFIEGRSPYSP |
| | SDTHEPDEEDQNRWYPSYQYQQESINSISLSGPGTPKIPKGITA |
| | EAKVKYSFNFKWGGDLPPMSTITNPTDQPTYVVPNNFNETTSL |
| | QNPTTRPEHFLYSFDERRGQLTEKATKRLLKDWETKETSLLST |
| | EYRFAEPTQTQAPQEDPSSEEEEESNLFERLLRQRTKQLQLKRR |
| | IIQTLKDLQKLE (SEQ ID NO: 2568) |
| 13. Ring10-ORF1 | MIVEWQPKSIRKSRIKGMLSLFQTTEDRLSYNFDMYEESIIPEK |
| delARM (Δ2-51) + | LPGGGGFSIKNISLYALYQEHIHAHNIFTHTNTDRPLARYTGSS |
| All Cysteine to Serine | LKFYQSKDIDYVVTYSTSLPLRSSMGMYNSMQPSIHLMQQNK |
| (C63S, C70S, C137S, | LIVPSKQTQKRRKPYIKKHISPPTQMKSQWYFQHNIANIPLLMI |
| C269S, C403S, | RTTALTLDNYYIGSRQLSTNVTIHTLNTTYIQNRDWGDRNKTY |
| C460S, C503S, | YSQTLGTQRYFLYGTHSTAQNINDIKLQELIPLTNTQDYVQGF |
| C515S) + | DWTEKDKHNITTYKEFLTKGAGNPFHAEWITAQNPVIHTANSP |
| P2 Cysteine for | TQIEQIYTASTTTFQNKCLTDLPTPGYIFITPTVSLRYNPYKDLA |
| conjugation (K371C) | ERNKSYFVRSKINAHGWDPEQHQELINSDLPQWLLLFGYPDYI |
| | KRTQNFALVDTNYILVDHSPYTNPEKTPFIPLSTSFIEGRSPYSP |
| | SDTHEPDEEDQNRWYPSYQYQQESINSISLSGPGTPKIPKGITA |
| | EAKVKYSFNFKWGGDLPPMSTITNPTDQPTYVVPNNFNETTSL |
| | QNPTTRPEHFLYSFDERRGQLTEKATKRLLKDWETKETSLLST |
| | EYRFAEPTQTQAPQEDPSSEEEEESNLFERLLRQRTKQLQLKRR |
| | IIQTLKDLQKLE (SEQ ID NO: 2569) |
| 6. Ring10-ORF1 | MIVEWQPKSIRKSRIKGMLSLFQTTEDRLSYNFDMYEESIIPEK |
| delARM (Δ2-51) + | LPGGGGFSIKNISLYALYQEHIHAHNIFTHTNTDRPLARYTGSS |
| All Cysteine to Serine | LKFYQSKDIDYVVTYSTSLPLRSSMGMYNSMQPSIHLMQQNK |
| (C63S, C70S, C137S, | LIVPSKQTQKRRKPYIKKHISPPTQMKSQWYFQHNIANIPLLMI |
| C269S, C403S, | RTTALTLDNYYIGSRQLSTNVTIHTLNTTYIQNRDWGDRNKTY |
| C460S, C503S, | YSQTLGTQRYFLYGTHSTACNINDIKLQELIPLTNTQDYVQGF |
| C515S) + | DWTEKDKHNITTYKEFLTKGAGNPFHAEWITAQNPVIHTANSP |
| P2 Cysteine for | TQIEQIYTASTTTFQNKKLTDLPTPGYIFITPTVSLRYNPYKDLA |
| conjugation (Q287C) | ERNKSYFVRSKINAHGWDPEQHQELINSDLPQWLLLFGYPDYI |
| | KRTQNFALVDTNYILVDHSPYTNPEKTPFIPLSTSFIEGRSPYSP |
| | SDTHEPDEEDQNRWYPSYQYQQESINSISLSGPGTPKIPKGITA |
| | EAKVKYSFNFKWGGDLPPMSTITNPTDQPTYVVPNNFNETTSL |
| | QNPTTRPEHFLYSFDERRGQLTEKATKRLLKDWETKETSLLST |
| | EYRFAEPTQTQAPQEDPSSEEEEESNLFERLLRQRTKQLQLKRR |
| | IIQTLKDLQKLE (SEQ ID NO: 2570) |
| Other P2 residues that | MPWWYRRRSYNPWRRRNWFRRPRKTIYRRYRRRRRWVRRK |
| can be replaced by | PFYKRKIKRLNIVEWQPKSIRKCRIKGMLCLFQTTEDRLSYNFD |
| Cysteines | MYEESIIPEKLPGGGGFSIKNISLYALYQEHIHAHNIFTHTNTDR |
| (Bold/Underlined and | PLARYTGCSLKFYQSKDIDYVVTYSTSLPLRSSMGMYNSMQPS |
| in Red) | IHLMQQNKLIVPSKQTQKRRKPYIKKHISPPTQMKSQWYFQHN |
| Y254, R263, N264, | IANIPLLMIRTTALTLDNYYIGSRQLSTNVTIHTLNTTYIQNRD |
| K265, L272, G273, | WGDRNKTYYCQTLGTQRYFLYGTHSTAQNINDIKLQELIPLT |
| T274, R276, H283, | NTQDYVQGFDWTEKDKHNITTYKEFLTKGAGNPFHAEWITA |
| T285, N288, D291, | QNPVIHTANSPTQIEQIYTASTTTFQNKKLTDLPTPGYIFITPTV |
| Q308, D311, W312, | SLRYNPYKDLAERNKCYFVRSKINAHGWDPEQHQELINSDLP |
| T313, E314, D316, | QWLLLFGYPDYIKRTQNFALVDTNYILVDHCPYTNPEKTPFIPL |
| H318, N319, T321, | STSFIEGRSPYSPSDTHEPDEEDQNRWYPCYQYQQESINSICLS |
| T328, K329, T341, | GPGTPKIPKGITAEAKVKYSFNFKWGGDLPPMSTITNPTDQPT |
| Q343, T354, Q358, | YVVPNNFNETTSLQNPTTRPEHFLYSFDERRGQLTEKATKRLL |
| T361, T364, Q368, | KDWETKETSLLSTEYRFAEPTQTQAPQEDPSSEEEEESNLFERL |
| D374, P376, P378, | LRQRTKQLQLKRRIIQTLKDLQKLE (SEQ ID NQ: 2571) |
| Y380, I381 | |

TABLE B2-4
Ring10 ORF1 molecules with tags (e.g., epitope tags)

| # ID | Sequence |
|---|---|
| 6xHis-flag tag | MGSSHHHHHHGSDYKDDDDKSGSLEVLFQGPSGATMP |
| (“HHHHHH” disclosed as | WWYRRRSYNPWRRRNWFRRPRKTIYRRYRRRRRWVRRKP |
| SEQ ID NO: 2743)on | FYKRKIKRLNIVEWQPKSIRKCRIKGMLCLFQTTEDRLSYNF |
| Ring10 N-terminus | DMYEESIIPEKLPGGGGFSIKNISLYALYQEHIHAHNIFTHTN |
| | TDRPLARYTGCSLKFYQSKDIDYVVTYSTSLPLRSSMGMYN |
| | SMQPSIHLMQQNKLIVPSKQTQKRRKPYIKKHISPPTQMKSQ |
| | WYFQHNIANIPLLMIRTTALTLDNYYIGSRQLSTNVTIHTLN |
| | TTYIQNRDWGDRNKTYYCQTLGTQRYFLYGTHSTAQNINDI |
| | KLQELIPLTNTQDYVQGFDWTEKDKHNITTYKEFLTKGAGN |
| | PFHAEWITAQNPVIHTANSPTQIEQIYTASTTTFQNKKLTDLP |
| | TPGYIFITPTVSLRYNPYKDLAERNKCYFVRSKINAHGWDPE |
| | QHQELINSDLPQWLLLFGYPDYIKRTQNFALVDTNYILVDH |
| | CPYTNPEKTPFIPLSTSFIEGRSPYSPSDTHEPDEEDQNRWYP |
| | CYQYQQESINSICLSGPGTPKIPKGITAEAKVKYSFNFKWGG |
| | DLPPMSTITNPTDQPTYVVPNNFNETTSLQNPTTRPEHFLYS |
| | FDERRGQLTEKATKRLLKDWETKETSLLSTEYRFAEPTQTQ |
| | APQEDPSSEEEEESNLFERLLRQRTKQLQLKRRIIQTLKDLQ |
| | KLE (SEQ ID NO: 2572) |
| 6His-flag tag | MPWWYRRRSYNPWRRRNWFRRPRKTIYRRYRRRRRWVRR |
| (“HHHHHH” disclosed as | KPFYKRKIKRLNIVEWQPKSIRKCRIKGMLCLFQTTEDRLSY |
| SEQ ID NO: 2743) on | NFDMYEESIIPEKLPGGGGFSIKNISLYALYQEHIHAHNIFTH |
| Ring10 C-terminus | TNTDRPLARYTGCSLKFYQSKDIDYVVTYSTSLPLRSSMGM |
| | YNSMQPSIHLMQQNKLIVPSKQTQKRRKPYIKKHISPPTQM |
| | KSQWYFQHNIANIPLLMIRTTALTLDNYYIGSRQLSTNVTIH |
| | TLNTTYIQNRDWGDRNKTYYCQTLGTQRYFLYGTHSTAQN |
| | INDIKLQELIPLTNTQDYVQGFDWTEKDKHNITTYKEFLTKG |
| | AGNPFHAEWITAQNPVIHTANSPTQIEQIYTASTTTFQNKKL |
| | TDLPTPGYIFITPTVSLRYNPYKDLAERNKCYFVRSKINAHG |
| | WDPEQHQELINSDLPQWLLLFGYPDYIKRTQNFALVDTNYI |
| | LVDHCPYTNPEKTPFIPLSTSFIEGRSPYSPSDTHEPDEEDQN |
| | RWYPCYQYQQESINSICLSGPGTPKIPKGITAEAKVKYSFNF |
| | KWGGDLPPMSTITNPTDQPTYVVPNNFNETTSLQNPTTRPE |
| | HFLYSFDERRGQLTEKATKRLLKDWETKETSLLSTEYRFAE |
| | PTQTQAPQEDPSSEEEEESNLFERLLRQRTKQLQLKRRIIQTL |
| | KDLQKLEGSSHHHHHHGSDYKDDDDKSGSLEVLFQGPS |
| | GAT (SEQ ID NO: 2573) |
| 6His-flag tag | MPWWYRRRSYNPWRRRNWFRRPRKTIYRRYRRRRRWVRR |
| (“HHHHHH” disclosed as | KPFYKRKIKRLNIVEWQPKSIRKCRIKGMLCLFQTTEDRLSY |
| SEQ ID NO: 2743) on | NFDMYEESIIPEKLPGGGGFSIKNISLYALYQEHIHAHNIFTH |
| Ring10 AC-terminus | TNTDRPLARYTGCSLKFYQSKDIDYVVTYSTSLPLRSSMGM |
| (Δ563-672) | YNSMQPSIHLMQQNKLIVPSKQTQKRRKPYIKKHISPPTQM |
| | KSQWYFQHNIANIPLLMIRTTALTLDNYYIGSRQLSTNVTIH |
| | TLNTTYIQNRDWGDRNKTYYCQTLGTQRYFLYGTHSTAQN |
| | INDIKLQELIPLTNTQDYVQGFDWTEKDKHNITTYKEFLTKG |
| | AGNPFHAEWITAQNPVIHTANSPTQIEQIYTASTTTFQNKKL |
| | TDLPTPGYIFITPTVSLRYNPYKDLAERNKCYFVRSKINAHG |
| | WDPEQHQELINSDLPQWLLLFGYPDYIKRTQNFALVDTNYI |
| | LVDHCPYTNPEKTPFIPLSTSFIEGRSPYSPSDTHEPDEEDQN |
| | RWYPCYQYQQESINSICLSGPGTPKIPKGITAEAKVKYSFNF |
| | KWGGDLPPMSTITNPTDQPTYVGSSHHHHHHGSDYKDDD |
| | DKSGSLEVLFQGPSGAT (SEQ ID NO: 2574) |
| SNAP tag attachment on | MPWWYRRRSYNPWRRRNWFRRPRKTIYRRYRRRRRWVRR |
| Ring10 C-terminus | KPFYKRKIKRLNIVEWQPKSIRKCRIKGMLCLFQTTEDRLSY |
| | NFDMYEESIIPEKLPGGGGFSIKNISLYALYQEHIHAHNIFTH |
| | TNTDRPLARYTGCSLKFYQSKDIDYVVTYSTSLPLRSSMGM |
| | YNSMQPSIHLMQQNKLIVPSKQTQKRRKPYIKKHISPPTQM |
| | KSQWYFQHNIANIPLLMIRTTALTLDNYYIGSRQLSTNVTIH |
| | TLNTTYIQNRDWGDRNKTYYCQTLGTQRYFLYGTHSTAQN |
| | INDIKLQELIPLTNTQDYVQGFDWTEKDKHNITTYKEFLTKG |
| | AGNPFHAEWITAQNPVIHTANSPTQIEQIYTASTTTFQNKKL |
| | TDLPTPGYIFITPTVSLRYNPYKDLAERNKCYFVRSKINAHG |
| | WDPEQHQELINSDLPQWLLLFGYPDYIKRTQNFALVDTNYI |
| | LVDHCPYTNPEKTPFIPLSTSFIEGRSPYSPSDTHEPDEEDQN |
| | RWYPCYQYQQESINSICLSGPGTPKIPKGITAEAKVKYSFNF |
| | KWGGDLPPMSTITNPTDQPTYVVPNNFNETTSLQNPTTRPE |
| | HFLYSFDERRGQLTEKATKRLLKDWETKETSLLSTEYRFAE |
| | PTQTQAPQEDPSSEEEEESNLFERLLRQRTKQLQLKRRIIQTL |
| | KDLQKLEMDKDCEMKRTTLDSPLGKLELSGCEQGLHRII |
| | FLGKGTSAADAVEVPAPAAVLGGPEPLMQATAWLNAYF |
| | HQPEAIEEFPVPALHHPVFQQESFTRQVLWKLLKVVKF |
| | GEVISYSHLAALAGNPAATAAVKTALSGNPVPILIPCHRV |
| | VQGDLDVGGYEGGLAVKEWLLAHEGHRLGKPGLG |
| | (SEQ ID NO: 2575) |
| SNAP tag attach on | MPWWYRRRSYNPWRRRNWFRRPRKTIYRRYRRRRRWVRR |
| Ring 10 (Δ563-672) C- | KPFYKRKIKRLNIVEWQPKSIRKCRIKGMLCLFQTTEDRLSY |
| terminus | NFDMYEESIIPEKLPGGGGFSIKNISLYALYQEHIHAHNIFTH |
| | TNTDRPLARYTGCSLKFYQSKDIDYVVTYSTSLPLRSSMGM |
| | YNSMQPSIHLMQQNKLIVPSKQTQKRRKPYIKKHISPPTQM |
| | KSQWYFQHNIANIPLLMIRTTALTLDNYYIGSRQLSTNVTIH |
| | TLNTTYIQNRDWGDRNKTYYCQTLGTQRYFLYGTHSTAQN |
| | INDIKLQELIPLTNTQDYVQGFDWTEKDKHNITTYKEFLTKG |
| | AGNPFHAEWITAQNPVIHTANSPTQIEQIYTASTTTFQNKKL |
| | TDLPTPGYIFITPTVSLRYNPYKDLAERNKCYFVRSKINAHG |
| | WDPEQHQELINSDLPQWLLLFGYPDYIKRTQNFALVDTNYI |
| | LVDHCPYTNPEKTPFIPLSTSFIEGRSPYSPSDTHEPDEEDQN |
| | RWYPCYQYQQESINSICLSGPGTPKIPKGITAEAKVKYSFNF |
| | KWGGDLPPMSTITNPTDQPTYVMDKDCEMKRTTLDSPLG |
| | KLELSGCEQGLHRIIFLGKGTSAADAVEVPAPAAVLGGP |
| | EPLMQATAWLNAYFHQPEAIEEFPVPALHHPVFQQESFT |
| | RQVLWKLLKVVKFGEVISYSHLAALAGNPAATAAVKTA |
| | LSGNPVPILIPCHRVVQGDLDVGGYEGGLAVKEWLLAH |
| | EGHRLGKPGLG (SEQ ID NO: 2576) |
| Halo-His tag attach on | MPWWYRRRSYNPWRRRNWFRRPRKTIYRRYRRRRRWVRR |
| Ring 10 (Δ563-672) C- | KPFYKRKIKRLNIVEWQPKSIRKCRIKGMLCLFQTTEDRLSY |
| terminus | NFDMYEESIIPEKLPGGGGFSIKNISLYALYQEHIHAHNIFTH |
| | TNTDRPLARYTGCSLKFYQSKDIDYVVTYSTSLPLRSSMGM |
| | YNSMQPSIHLMQQNKLIVPSKQTQKRRKPYIKKHISPPTQM |
| | KSQWYFQHNIANIPLLMIRTTALTLDNYYIGSRQLSTNVTIH |
| | TLNTTYIQNRDWGDRNKTYYCQTLGTQRYFLYGTHSTAQN |
| | INDIKLQELIPLTNTQDYVQGFDWTEKDKHNITTYKEFLTKG |
| | AGNPFHAEWITAQNPVIHTANSPTQIEQIYTASTTTFQNKKL |
| | TDLPTPGYIFITPTVSLRYNPYKDLAERNKCYFVRSKINAHG |
| | WDPEQHQELINSDLPQWLLLFGYPDYIKRTQNFALVDTNYI |
| | LVDHCPYTNPEKTPFIPLSTSFIEGRSPYSPSDTHEPDEEDQN |
| | RWYPCYQYQQESINSICLSGPGTPKIPKGITAEAKVKYSFNF |
| | KWGGDLPPMSTITNPTDQPTYVMAEIGTGFPFDPHYVEVL |
| | GERMHYVDVGPRDGTPVLFLHGNPTSSYVWRNIIPHVAP |
| | THRCIAPDLIGMGKSDKPDLGYFFDDHVRFMDAFIEALG |
| | LEEVVLVIHDWGSALGFHWAKRNPERVKGIAFMEFIRPI |
| | PTWDEWPEFARETFQAFRTTDVGRKLIIDQNVFIEGTLP |
| | MGVVRPLTEVEMDHYREPFLNPVDREPLWRFPNELPIA |
| | GEPANIVALVEEYMDWLHQSPVPKLLFWGTPGVLIPPAE |
| | AARLAKSLPNCKAVDIGPGLNLLQEDNPDLIGSEIARWL |
| | STLEIS (SEQ ID NO: 2577) |
| CLIP tag attach on Ring | MPWWYRRRSYNPWRRRNWFRRPRKTIYRRYRRRRRWVRR |
| 10 (Δ563-672) C- | KPFYKRKIKRLNIVEWQPKSIRKCRIKGMLCLFQTTEDRLSY |
| terminus | NEDMYEESIIPEKLPGGGGFSIKNISLYALYQEHIHAHNIFTH |
| | TNTDRPLARYTGCSLKFYQSKDIDYVVTYSTSLPLRSSMGM |
| | YNSMQPSIHLMQQNKLIVPSKQTQKRRKPYIKKHISPPTQM |
| | KSQWYFQHNIANIPLLMIRTTALTLDNYYIGSRQLSTNVTIH |
| | TLNTTYIQNRDWGDRNKTYYCQTLGTQRYFLYGTHSTAQN |
| | INDIKLQELIPLTNTQDYVQGFDWTEKDKHNITTYKEFLTKG |
| | AGNPFHAEWITAQNPVIHTANSPTQIEQIYTASTTTFQNKKL |
| | TDLPTPGYIFITPTVSLRYNPYKDLAERNKCYFVRSKINAHG |
| | WDPEQHQELINSDLPQWLLLFGYPDYIKRTQNFALVDTNYI |
| | LVDHCPYTNPEKTPFIPLSTSFIEGRSPYSPSDTHEPDEEDQN |
| | RWYPCYQYQQESINSICLSGPGTPKIPKGITAEAKVKYSFNF |
| | KWGGDLPPMSTITNPTDQPTYVMDKDCEMKRTTLDSPLG |
| | KLELSGCEQGLHRIIFLGKGTSAADAVEVPAPAAVLGGP |
| | EPLIQATAWLNAYFHQPEAIEEFPVPALHHPVFQQESFT |
| | RQVLWKLLKVVKFGEVISESHLAALVGNPAATAAVNTA |
| | LDGNPVPILIPCHRVVQGDSDVGPYLGGLAVKEWLLAH |
| | EGHRLGKPGLG (SEQ ID NO: 2578) |
| Ring10 C-terminus | MPWWYRRRSYNPWRRRNWFRRPRKTIYRRYRRRRRWVRR |
| (Δ563-672) + AVI-tag | KPFYKRKIKRLNIVEWQPKSIRKCRIKGMLCLFQTTEDRLSY |
| insertion between 284- | NFDMYEESIIPEKLPGGGGFSIKNISLYALYQEHIHAHNIFTH |
| 285 | TNTDRPLARYTGCSLKFYQSKDIDYVVTYSTSLPLRSSMGM |
| | YNSMQPSIHLMQQNKLIVPSKQTQKRRKPYIKKHISPPTQM |
| | KSQWYFQHNIANIPLLMIRTTALTLDNYYIGSRQLSTNVTIH |
| | TLNTTYIQNRDWGDRNKTYYCQTLGTQRYFLYGTHSGLND |
| | IFEAQKIEWHETAQNINDIKLQELIPLTNTQDYVQGFDWTE |
| | KDKHNITTYKEFLTKGAGNPFHAEWITAQNPVIHTANSPTQI |
| | EQIYTASTTTFQNKKLTDLPTPGYIFITPTVSLRYNPYKDLAE |
| | RNKCYFVRSKINAHGWDPEQHQELINSDLPQWLLLFGYPD |
| | YIKRTQNFALVDTNYILVDHCPYTNPEKTPFIPLSTSFIEGRSP |
| | YSPSDTHEPDEEDQNRWYPCYQYQQESINSICLSGPGTPKIP |
| | KGITAEAKVKYSFNFKWGGDLPPMSTITNPTDQPTYV (SEQ |
| | ID NO: 2579) |
| Ring10 delARM (Δ2- | MKRLNIVEWQPKSIRKCRIKGMLCLFQTTEDRLSYNFDMYE |
| 47) C-terminus (Δ563- | ESIIPEKLPGGGGFSIKNISLYALYQEHIHAHNIFTHTNTDRPL |
| 672) + AVI-tag insertion | ARYTGCSLKFYQSKDIDYVVTYSTSLPLRSSMGMYNSMQPS |
| between 284-285 | IHLMQQNKLIVPSKQTQKRRKPYIKKHISPPTQMKSQWYFQ |
| | HNIANIPLLMIRTTALTLDNYYIGSRQLSTNVTIHTLNTTYIQ |
| | NRDWGDRNKTYYCQTLGTQRYFLYGTHSGLNDIFEAQKIE |
| | WHETAQNINDIKLQELIPLTNTQDYVQGFDWTEKDKHNITT |
| | YKEFLTKGAGNPFHAEWITAQNPVIHTANSPTQIEQIYTAST |
| | TTFQNKKLTDLPTPGYIFITPTVSLRYNPYKDLAERNKCYFV |
| | RSKINAHGWDPEQHQELINSDLPQWLLLFGYPDYIKRTQNF |
| | ALVDTNYILVDHCPYTNPEKTPFIPLSTSFIEGRSPYSPSDTHE |
| | PDEEDQNRWYPCYQYQQESINSICLSGPGTPKIPKGITAEAK |
| | VKYSFNFKWGGDLPPMSTITNPTDQPTYV (SEQ ID NO: |
| | 2580) |
| Ring10 C-terminus | MPWWYRRRSYNPWRRRNWFRRPRKTIYRRYRRRRRWVRR |
| (Δ563-672) + AVI-tag | KPFYKRKIKRLNIVEWQPKSIRKCRIKGMLCLFQTTEDRLSY |
| insertion between 328- | NFDMYEESIIPEKLPGGGGFSIKNISLYALYQEHIHAHNIFTH |
| 329 | TNTDRPLARYTGCSLKFYQSKDIDYVVTYSTSLPLRSSMGM |
| | YNSMQPSIHLMQQNKLIVPSKQTQKRRKPYIKKHISPPTQM |
| | KSQWYFQHNIANIPLLMIRTTALTLDNYYIGSRQLSTNVTIH |
| | TLNTTYIQNRDWGDRNKTYYCQTLGTQRYFLYGTHSTAQN |
| | INDIKLQELIPLTNTQDYVQGFDWTEKDKHNITTYKEFLGL |
| | NDIFEAQKIEWHETKGAGNPFHAEWITAQNPVIHTANSPT |
| | QIEQIYTASTTTFQNKKLTDLPTPGYIFITPTVSLRYNPYKDL |
| | AERNKCYFVRSKINAHGWDPEQHQELINSDLPQWLLLFGYP |
| | DYIKRTQNFALVDTNYILVDHCPYTNPEKTPFIPLSTSFIEGR |
| | SPYSPSDTHEPDEEDQNRWYPCYQYQQESINSICLSGPGTPK |
| | IPKGITAEAKVKYSFNFKWGGDLPPMSTITNPTDQPTYV |
| | (SEQ ID NO: 2581) |
| Ring10 delARM (Δ2- | MKRLNIVEWQPKSIRKCRIKGMLCLFQTTEDRLSYNFDMYE |
| 47) C-terminus (Δ563- | ESIIPEKLPGGGGFSIKNISLYALYQEHIHAHNIFTHTNTDRPL |
| 672) + AVI-tag insertion | ARYTGCSLKFYQSKDIDYVVTYSTSLPLRSSMGMYNSMQPS |
| between 328-329 | IHLMQQNKLIVPSKQTQKRRKPYIKKHISPPTQMKSQWYFQ |
| | HNIANIPLLMIRTTALTLDNYYIGSRQLSTNVTIHTLNTTYIQ |
| | NRDWGDRNKTYYCQTLGTQRYFLYGTHSTAQNINDIKLQE |
| | LIPLTNTQDYVQGFDWTEKDKHNITTYKEFLGLNDIFEAQK |
| | IEWHETKGAGNPFHAEWITAQNPVIHTANSPTQIEQIYTAST |
| | TTFQNKKLTDLPTPGYIFITPTVSLRYNPYKDLAERNKCYFV |
| | RSKINAHGWDPEQHQELINSDLPQWLLLFGYPDYIKRTQNF |
| | ALVDTNYILVDHCPYTNPEKTPFIPLSTSFIEGRSPYSPSDTHE |
| | PDEEDQNRWYPCYQYQQESINSICLSGPGTPKIPKGITAEAK |
| | VKYSFNFKWGGDLPPMSTITNPTDQPTYV (SEQ ID NO: |
| | 2582) |
| Ring10 delARM (Δ2- | MKRLNIVEWQPKSIRKCRIKGMLCLFQTTEDRLSYNFDMYE |
| 47) + P2 (Δ256-383) | ESIIPEKLPGGGGFSIKNISLYALYQEHIHAHNIFTHTNTDRPL |
| replaced by | ARYTGCSLKFYQSKDIDYVVTYSTSLPLRSSMGMYNSMQPS |
| miRFP670nano | IHLMQQNKLIVPSKQTQKRRKPYIKKHISPPTQMKSQWYFQ |
| | HNIANIPLLMIRTTALTLDNYYIGSRQLSTNVTIHTLNTTYIA |
| | NLDKMLNTTVTEVRQFLQVDRVCVFQFEEDYSGVVVVE |
| | AVDDRWISILKTQVRDRYFMETRGEEYSHGRYQAIADIY |
| | TANLTECYRDLLTQFQVRAILAVPILQGKKLWGLLVAH |
| | QLAAPRQWQTWEIDFLKQQAVVVGIAIQQSTPTVSLRYN |
| | PYKDLAERNKCYFVRSKINAHGWDPEQHQELINSDLPQWL |
| | LLFGYPDYIKRTQNFALVDTNYILVDHCPYTNPEKTPFIPLST |
| | SFIEGRSPYSPSDTHEPDEEDQNRWYPCYQYQQESINSICLSG |
| | PGTPKIPKGITAEAKVKYSFNFKWGGDLPPMSTITNPTDQPT |
| | YV (SEQ ID NO: 2583) |
| Ring10 delARM (Δ2- | MKRLNIVEWQPKSIRKCRIKGMLCLFQTTEDRLSYNFDMY |
| 47) + ΔC-terminus | EESIIPEKLPGGGGFSIKNISLYALYQEHIHAHNIFTHTNTDR |
| (Δ563-672) + P2 (Δ256- | PLARYTGCSLKFYQSKDIDYVVTYSTSLPLRSSMGMYNSM |
| 383) replaced by | QPSIHLMQQNKLIVPSKQTQKRRKPYIKKHISPPTQMKSQW |
| SpyCatcher03 Protein + | YFQHNIANIPLLMIRTTALTLDNYYIGSRQLSTNVTIHTLNT |
| GGGS linkers | TYIGGGGSVTTLSGLSGEQGPSGDMTTEEDSATHIKFSK |
| | RDEDGRELAGATMELRDSSGKTISTWISDGHVKDFYLY |
| | PGKYTFVETAAPDGYEVATPIEFTVNEDGQVTVDGEAT |
| | EGDAHTGGGGSTPTVSLRYNPYKDLAERNKCYFVRSKIN |
| | AHGWDPEQHQELINSDLPQWLLLFGYPDYIKRTQNFALVD |
| | TNYILVDHCPYTNPEKTPFIPLSTSFIEGRSPYSPSDTHEPDE |
| | EDQNRWYPCYQYQQESINSICLSGPGTPKIPKGITAEAKVK |
| | YSFNFKWGGDLPPMSTITNPTDQPTYV (SEQ ID NO: 2584) |
| GFP linker with the | MPWWYRRRSYNPWRRRNWFRRPRKTIYRRYRRRRRWVRR |
| Ring10 C-terminus | KPFYKRKIKRLNIVEWQPKSIRKCRIKGMLCLFQTTEDRLSY |
| (Δ563-672) | NFDMYEESIIPEKLPGGGGFSIKNISLYALYQEHIHAHNIFTH |
| | TNTDRPLARYTGCSLKFYQSKDIDYVVTYSTSLPLRSSMGM |
| | YNSMQPSIHLMQQNKLIVPSKQTQKRRKPYIKKHISPPTQM |
| | KSQWYFQHNIANIPLLMIRTTALTLDNYYIGSRQLSTNVTIH |
| | TLNTTYIQNRDWGDRNKTYYCQTLGTQRYFLYGTHSTAQN |
| | INDIKLQELIPLTNTQDYVQGFDWTEKDKHNITTYKEFLTKG |
| | AGNPFHAEWITAQNPVIHTANSPTQIEQIYTASTTTFQNKKL |
| | TDLPTPGYIFITPTVSLRYNPYKDLAERNKCYFVRSKINAHG |
| | WDPEQHQELINSDLPQWLLLFGYPDYIKRTQNFALVDTNYI |
| | LVDHCPYTNPEKTPFIPLSTSFIEGRSPYSPSDTHEPDEEDQN |
| | RWYPCYQYQQESINSICLSGPGTPKIPKGITAEAKVKYSFNF |
| | KWGGDLPPMSTITNPTDQPTYVSKGEELFTGVVPILVELD |
| | GDVNGHKFSVSGEGEGDATYGKLTLKFICTTGKLPVPW |
| | PTLVTTLTYGVQCESRYPDHMKQHDFFKSAMPEGYVQE |
| | RTIFFKDDGNYKTRAEVKFEGDTLVNRIELKGIDFKEDG |
| | NILGHKLEYNYNSHNVYIMADKQKNGIKVNFKIRHNIED |
| | GSVQLADHYQQNTPIGDGPVLLPDNHYLSTQSALSKDPN |
| | EKRDHMVLLEFVTAAGITLGMDELYK (SEQ ID NO: 2585) |
| Ring10 delARM (Δ2- | MIVEWQPKSIRKCRIKGMLCLFQTTEDRLSYNFDMYEESIIP |
| 51) + P2 (Δ251-383) | EKLPGGGGFSIKNISLYALYQEHIHAHNIFTHTNTDRPLARY |
| replaced by C-terminus | TGCSLKFYQSKDIDYVVTYSTSLPLRSSMGMYNSMQPSIHL |
| of Malaria CS protein | MQQNKLIVPSKQTQKRRKPYIKKHISPPTQMKSQWYFQHNI |
| | ANIPLLMIRTTALTLDNYYIGSRQLSTNVTIHTLANPNANPN |
| | ANPNANPNANPNANPNANPNANPNANPNANPNANPNANP |
| | NANPNANPNANPNKNNQGNGQGHNMPNDPNRNVDENA |
| | NANSAVKNNNNEEPSDKHIKEYLNKIQNSLSTEWSPCSV |
| | TCGNGIQVRIKPGSANKPKDELDYANDIEKKICKMEKCS |
| | SVFNVVNSSIGLIMVLSFLFLNTPTVSLRYNPYKDLAERNK |
| | CYFVRSKINAHGWDPEQHQELINSDLPQWLLLFGYPDYIKR |
| | TQNFALVDTNYILVDHCPYTNPEKTPFIPLSTSFIEGRSPYSPS |
| | DTHEPDEEDQNRWYPCYQYQQESINSICLSGPGTPKIPKGIT |
| | AEAKVKYSFNFKWGGDLPPMSTITNPTDQPTYVVPNNFNET |
| | TSLQNPTTRPEHFLYSFDERRGQLTEKATKRLLKDWETKET |
| | SLLSTEYRFAEPTQTQAPQEDPSSEEEEESNLFERLLRQRTK |
| | QLQLKRRIIQTLKDLQKLE (SEQ ID NO: 2586) |
| Ring10 delARM (Δ2- | MIVEWQPKSIRKCRIKGMLCLFQTTEDRLSYNFDMYEESIIP |
| 51) + AC-terminus | EKLPGGGGFSIKNISLYALYQEHIHAHNIFTHTNTDRPLARY |
| (Δ563-672) replaced by | TGCSLKFYQSKDIDYVVTYSTSLPLRSSMGMYNSMQPSIHL |
| C-Terminus of Malaria | MQQNKLIVPSKQTQKRRKPYIKKHISPPTQMKSQWYFQHNI |
| CS protein | ANIPLLMIRTTALTLDNYYIGSRQLSTNVTIHTLNTTYIQNRD |
| | WGDRNKTYYCQTLGTQRYFLYGTHSTAQNINDIKLQELIPL |
| | TNTQDYVQGFDWTEKDKHNITTYKEFLTKGAGNPFHAEWI |
| | TAQNPVIHTANSPTQIEQIYTASTTTFQNKKLTDLPTPGYIFIT |
| | PTVSLRYNPYKDLAERNKCYFVRSKINAHGWDPEQHQELIN |
| | SDLPQWLLLFGYPDYIKRTQNFALVDTNYILVDHCPYTNPE |
| | KTPFIPLSTSFIEGRSPYSPSDTHEPDEEDQNRWYPCYQYQQ |
| | ESINSICLSGPGTPKIPKGITAEAKVKYSFNFKWGGDLPPMST |
| | ITNPTDQPTYVNPNANPNANPNANPNANPNANPNANPNAN |
| | PNANPNANPNANPNANPNANPNANPNANPNKNNQGNGQ |
| | GHNMPNDPNRNVDENANANSAVKNNNNEEPSDKHIKEY |
| | LNKIQNSLSTEWSPCSVTCGNGIQVRIKPGSANKPKDELD |
| | YANDIEKKICKMEKCSSVFNVVNSSIGLIMVLSFLFLN |
| | (SEQ ID NO: 2587) |
| Ring10 delARM (Δ2- | MKIKRLNIVEWQPKSIRKCRIKGMLCLFQTTEDRLSYNFDM |
| 45) with Structured | YEESIIPEKLPGGGGFSIKNISLYALYQEHIHAHNIFTHTNTDR |
| Malaria Graft replacing | PLARYTGCSLKFYQSKDIDYVVTYSTSLPLRSSMGMYNSMQ |
| HVR (Δ251-384) | PSIHLMQQNKLIVPSKQTQKRRKPYIKKHISPPTQMKSQWYF |
| | QHNIANIPLLMIRTTALTLDNYYIGSRQLSTNVTIHTLEPSDK |
| | HIKEYLNKIQNSLSTEWSPCSVTCGNGIQVRIKPGSANKP |
| | KDELDYANDIEKKICKMEKCSSPTVSLRYNPYKDLAERNK |
| | CYFVRSKINAHGWDPEQHQELINSDLPQWLLLFGYPDYIKR |
| | TQNFALVDTNYILVDHCPYTNPEKTPFIPLSTSFIEGRSPYSPS |
| | DTHEPDEEDQNRWYPCYQYQQESINSICLSGPGTPKIPKGIT |
| | AEAKVKYSFNFKWGGDLPPMSTITNPTDQPTYVVPNNFNET |
| | TSLQNPTTRPEHFLYSFDERRGQLTEKATKRLLKDWETKET |
| | SLLSTEYRFAEPTQTQAPQEDPSSEEEEESNLFERLLRQRTK |
| | QLQLKRRIIQTLKDLQKLE (SEQ ID NO: 2588) |
| Ring10 delARM (Δ2- | MKIKRLNIVEWQPKSIRKCRIKGMLCLFQTTEDRLSYNFDM |
| 45) with NANPx6 | YEESIIPEKLPGGGGFSIKNISLYALYQEHIHAHNIFTHTNTDR |
| Malaria Graft replacing | PLARYTGCSLKFYQSKDIDYVVTYSTSLPLRSSMGMYNSMQ |
| HVR (Δ251-384) | PSIHLMQQNKLIVPSKQTQKRRKPYIKKHISPPTQMKSQWYF |
| | QHNIANIPLLMIRTTALTLDNYYIGSRQLSTNVTIHTLNANP |
| | NANPNANPNANPNANPNANPPTVSLRYNPYKDLAERNKC |
| | YFVRSKINAHGWDPEQHQELINSDLPQWLLLFGYPDYIKRT |
| | QNFALVDTNYILVDHCPYTNPEKTPFIPLSTSFIEGRSPYSPS |
| | DTHEPDEEDQNRWYPCYQYQQESINSICLSGPGTPKIPKGIT |
| | AEAKVKYSFNFKWGGDLPPMSTITNPTDQPTYVVPNNFNET |
| | TSLQNPTTRPEHFLYSFDERRGQLTEKATKRLLKDWETKET |
| | SLLSTEYRFAEPTQTQAPQEDPSSEEEEESNLFERLLRQRTK |
| | QLQLKRRIIQTLKDLQKLE (SEQ ID NO: 2589) |

TABLE B2-5
Ring2 ORF1 molecules with different
tags on the surface

| | |
|---|---|
| Ring2 delARM (Δ2-45) + | MLKQWQPPYKRTCYIKGQDCLIYYSNL |
| P2 (Δ249-383) | RLGMNSTMYEKSIVPVHWPGGGSFSVS |
| replaced by | MLTLDALYDIHKLCRNWWTSTNQDLPL |
| miRFP670nano + | VRYKGCKITFYQSTFTDYIVRIHTELP |
| delCTerm (611-666) | ANSNKLTYPNTHPLMMMMSKYKHIIPS |
| | RQTRRKKKPYTKIFVKPPPQFENKWYF |
| | ATDLYKIPLLQIHCTACNLQNPFVKPD |
| | KLSNNVTLWSLNTISIQNRNMSVDQGQ |
| | SWPFKILGTQSFYFYFYTGANLPGDTT |
| | QIPVADLLPLTNPRINRPGQSLNEAKI |
| | TDHITFTEYKNKFTNYWGNPFNKHIQE |
| | HLDMILYSLKSPEAIKNEWTTENMKWN |
| | QLNNAGTMALTPFNEPIFTQIQYNPDR |
| | DTGEDTQLYLLSNATGTGWDPPGIPEL |
| | ILEGFPLWLIYWGFADFQKNLKKVTNI |
| | DTNYMLVAKTKFTQKPGTFYLVILNDT |
| | FVEGNSPYEKQPLPEDNIKWYPQVQYQ |
| | LEAQNKLLQTGPFTPNIQGQLSDNISM |
| | FYKFYFKWGGSPPKAINVENPAHQIQY |
| | PIPRNEHETTSLQSPGEAPESILYSFD |
| | YRHGNYTTTALSRISQDWALKDTVSK |
| | (SEQ ID NO: 2590) |

TABLE B2-6
Ring19 ORF1 molecules with different tag attachments

| # ID | Sequence |
|---|---|
| Ring19 delARM (Δ2-46) + | MKITTKEWQPKVIRKTHVKGTYPLFLCTKHRINNNMIQYLDSI |
| P2 (Δ254-370) | APEHYYGGGGFSIMQFSLQALYEEFIKAKNWWTNTNCFLPLV |
| replaced by | RYMGCSFKFYKTEFYDYIVLIERCYPLACTDEMYLSTQPSIMM |
| miRFP670nano | LTRKCIFVPCKQNSKGKKPYKKVRVRPPSQMTTGWHFSQDL |
| | ANMPLVVLKTSVCSFDRYYTDSTAKSTTIGFKTLNTQTFANL |
| | DKMLNTTVTEVRQFLQVDRVCVFQFEEDYSGVVVVEAVD |
| | DRWISILKTQVRDRYFMETRGEEYSHGRYQAIADIYTANLT |
| | ECYRDLLTQFQVRAILAVPILQGKKLWGLLVAHQLAAPRQ |
| | WQTWEIDFLKQQAVVVGIAIQQSPLWLPCRYNPFADKATN |
| | NKIWLVSIHSDHTEWKPIDNPLLQRTDLPLWLLVWGWQDWQ |
| | KKNQQTSQPDINYLTVISSPYISCYPKLDYYVLLDEGFWEGHS |
| | TYIESITDSDKKHWYPKNRFQIETLNLIANTGPGTVKLRENQA |
| | AEGHMVYRFNFKLGGCPAPMEKICDPSKQSKYPIPNNQQQTT |
| | SLQSPENPIQTYLYDFDERRGLLTERATKRIKQDHTSEK |
| | (SEQ ID NO: 2591) |
| Ring_19_Cterm | MPWYPRRRYPRRRYRWLRRWRARRPFRPRYRRRYWVRNYS |
| 599_SL_His | RKRKLFKITTKEWQPKVIRKTHVKGTYPLFLCTKHRINNNMIQ |
| Δ600-655 | YLDSIAPEHYYGGGGFSIMQFSLQALYEEFIKAKNWWTNTNC |
| | FLPLVRYMGCSFKFYKTEFYDYIVLIERCYPLACTDEMYLSTQ |
| | PSIMMLTRKCIFVPCKQNSKGKKPYKKVRVRPPSQMTTGWHF |
| | SQDLANMPLVVLKTSVCSFDRYYTDSTAKSTTIGFKTLNTQTF |
| | RYHDWQEPPTTGYKPQNLLWFYGAENGSPVDPNNTIVSNLIY |
| | LGGTGPYEKGTPIKTNISNYFSEPKLWGNIFHDDYTSGTSPVF |
| | VTNKSPSEIKTAWNTIKDLTVKASGVFTLRTIPLWLPCRYNPF |
| | ADKATNNKIWLVSIHSDHTEWKPIDNPLLQRTDLPLWLLVWG |
| | WQDWQKKNQQTSQPDINYLTVISSPYISCYPKLDYYVLLDEG |
| | FWEGHSTYIESITDSDKKHWYPKNRFQIETLNLIANTGPGTVK |
| | LRENQAAEGHMVYRFNFKLGGCPAPMEKICDPSKQSKYPIPN |
| | NQQQTTSLQSPENPIQTYLYDFDERRGLLTERATKRIKQDHTS |
| | EKTVLPGSSGSALEVLFEGPGSHHHHHHHHH (SEQ ID NO: 2592) |
| Ring_19_Cterm | MPWYPRRRYPRRRYRWLRRWRARRPFRPRYRRRYWVRNYS |
| 599_LL_His | RKRKLFKITTKEWQPKVIRKTHVKGTYPLFLCTKHRINNNMIQ |
| Δ600-655 | YLDSIAPEHYYGGGGFSIMQFSLQALYEEFIKAKNWWTNTNC |
| | FLPLVRYMGCSFKFYKTEFYDYIVLIERCYPLACTDEMYLSTQ |
| | PSIMMLTRKCIFVPCKQNSKGKKPYKKVRVRPPSQMTTGWHF |
| | SQDLANMPLVVLKTSVCSFDRYYTDSTAKSTTIGFKTLNTQTF |
| | RYHDWQEPPTTGYKPQNLLWFYGAENGSPVDPNNTIVSNLIY |
| | LGGTGPYEKGTPIKTNISNYFSEPKLWGNIFHDDYTSGTSPVF |
| | VTNKSPSEIKTAWNTIKDLTVKASGVFTLRTIPLWLPCRYNPF |
| | ADKATNNKIWLVSIHSDHTEWKPIDNPLLQRTDLPLWLLVWG |
| | WQDWQKKNQQTSQPDINYLTVISSPYISCYPKLDYYVLLDEG |
| | FWEGHSTYIESITDSDKKHWYPKNRFQIETLNLIANTGPGTVK |
| | LRENQAAEGHMVYRFNFKLGGCPAPMEKICDPSKQSKYPIPN |
| | NQQQTTSLQSPENPIQTYLYDFDERRGLLTERATKRIKQDHTS |
| | EKTVLPGSSGSAGSSGSAGSSGSALEVLFEGPGSHHHHHHH |
| | HH (SEQ ID NO: 2593) |
| Ring_19_Cterm | MPWYPRRRYPRRRYRWLRRWRARRPFRPRYRRRYWVRNYS |
| 599_SL_GFPHis | RKRKLFKITTKEWQPKVIRKTHVKGTYPLFLCTKHRINNNMIQ |
| Δ600-655 | YLDSIAPEHYYGGGGFSIMQFSLQALYEEFIKAKNWWTNTNC |
| | FLPLVRYMGCSFKFYKTEFYDYIVLIERCYPLACTDEMYLSTQ |
| | PSIMMLTRKCIFVPCKQNSKGKKPYKKVRVRPPSQMTTGWHF |
| | SQDLANMPLVVLKTSVCSFDRYYTDSTAKSTTIGFKTLNTQTF |
| | RYHDWQEPPTTGYKPQNLLWFYGAENGSPVDPNNTIVSNLIY |
| | LGGTGPYEKGTPIKTNISNYFSEPKLWGNIFHDDYTSGTSPVF |
| | VTNKSPSEIKTAWNTIKDLTVKASGVFTLRTIPLWLPCRYNPF |
| | ADKATNNKIWLVSIHSDHTEWKPIDNPLLQRTDLPLWLLVWG |
| | WQDWQKKNQQTSQPDINYLTVISSPYISCYPKLDYYVLLDEG |
| | FWEGHSTYIESITDSDKKHWYPKNRFQIETLNLIANTGPGTVK |
| | LRENQAAEGHMVYRFNFKLGGCPAPMEKICDPSKQSKYPIPN |
| | NQQQTTSLQSPENPIQTYLYDFDERRGLLTERATKRIKQDHTS |
| | EKTVLPGSSGSALEVLFEGPGSMVSKGEELFTGVVPILVEL |
| | DGDVNGHKFSVSGEGEGDATYGKLTLKFICTTGKLPVPW |
| | PTLVTTLTYGVQCESRYPDHMKQHDFFKSAMPEGYVQER |
| | TIFFKDDGNYKTRAEVKFEGDTLVNRIELKGIDFKEDGNIL |
| | GHKLEYNYNSHNVYIMADKQKNGIKVNFKIRHNIEDGSVQ |
| | LADHYQQNTPIGDGPVLLPDNHYLSTQSALSKDPNEKRDH |
| | MVLLEFVTAAGITLGMDELYKHHHHHHHHH (SEQ ID NO: 2594) |
| Ring_19_Cterm | MPWYPRRRYPRRRYRWLRRWRARRPFRPRYRRRYWVRNYS |
| 599_LL_GFPHis | RKRKLFKITTKEWQPKVIRKTHVKGTYPLFLCTKHRINNNMIQ |
| Δ600-655 | YLDSIAPEHYYGGGGFSIMQFSLQALYEEFIKAKNWWTNTNC |
| | FLPLVRYMGCSFKFYKTEFYDYIVLIERCYPLACTDEMYLSTQ |
| | PSIMMLTRKCIFVPCKQNSKGKKPYKKVRVRPPSQMTTGWHF |
| | SQDLANMPLVVLKTSVCSFDRYYTDSTAKSTTIGFKTLNTQTF |
| | RYHDWQEPPTTGYKPQNLLWFYGAENGSPVDPNNTIVSNLIY |
| | LGGTGPYEKGTPIKTNISNYFSEPKLWGNIFHDDYTSGTSPVF |
| | VTNKSPSEIKTAWNTIKDLTVKASGVFTLRTIPLWLPCRYNPF |
| | ADKATNNKIWLVSIHSDHTEWKPIDNPLLQRTDLPLWLLVWG |
| | WQDWQKKNQQTSQPDINYLTVISSPYISCYPKLDYYVLLDEG |
| | FWEGHSTYIESITDSDKKHWYPKNRFQIETLNLIANTGPGTVK |
| | LRENQAAEGHMVYRFNFKLGGCPAPMEKICDPSKQSKYPIPN |
| | NQQQTTSLQSPENPIQTYLYDFDERRGLLTERATKRIKQDHTS |
| | EKTVLPGSSGSAGSSGSAGSSGSALEVLFEGPGSMVSKGEE |
| | LFTGVVPILVELDGDVNGHKFSVSGEGEGDATYGKLTLKF |
| | ICTTGKLPVPWPTLVTTLTYGVQCESRYPDHMKQHDFFKS |
| | AMPEGYVQERTIFFKDDGNYKTRAEVKFEGDTLVNRIELK |
| | GIDFKEDGNILGHKLEYNYNSHNVYIMADKQKNGIKVNFK |
| | IRHNIEDGSVQLADHYQQNTPIGDGPVLLPDNHYLSTQSAL |
| | SKDPNEKRDHMVLLEFVTAAGITLGMDELYKHHHHHHH |
| | HH (SEQ ID NO: 2595) |
| Ring_19_Cterm | MPWYPRRRYPRRRYRWLRRWRARRPFRPRYRRRYWVRNYS |
| 599_SL_HA | RKRKLFKITTKEWQPKVIRKTHVKGTYPLFLCTKHRINNNMIQ |
| Δ600-655 | YLDSIAPEHYYGGGGFSIMQFSLQALYEEFIKAKNWWTNTNC |
| | FLPLVRYMGCSFKFYKTEFYDYIVLIERCYPLACTDEMYLSTQ |
| | PSIMMLTRKCIFVPCKQNSKGKKPYKKVRVRPPSQMTTGWHF |
| | SQDLANMPLVVLKTSVCSFDRYYTDSTAKSTTIGFKTLNTQTF |
| | RYHDWQEPPTTGYKPQNLLWFYGAENGSPVDPNNTIVSNLIY |
| | LGGTGPYEKGTPIKTNISNYFSEPKLWGNIFHDDYTSGTSPVF |
| | VTNKSPSEIKTAWNTIKDLTVKASGVFTLRTIPLWLPCRYNPF |
| | ADKATNNKIWLVSIHSDHTEWKPIDNPLLQRTDLPLWLLVWG |
| | WQDWQKKNQQTSQPDINYLTVISSPYISCYPKLDYYVLLDEG |
| | FWEGHSTYIESITDSDKKHWYPKNRFQIETLNLIANTGPGTVK |
| | LRENQAAEGHMVYRFNFKLGGCPAPMEKICDPSKQSKYPIPN |
| | NQQQTTSLQSPENPIQTYLYDFDERRGLLTERATKRIKQDHTS |
| | EKTVLPGSSGSALEVLFEGPGSYPYDVPDYA (SEQ ID NO: 2596) |
| Ring_19_Cterm | MPWYPRRRYPRRRYRWLRRWRARRPFRPRYRRRYWVRNYS |
| 599_LL_HA | RKRKLFKITTKEWQPKVIRKTHVKGTYPLFLCTKHRINNNMIQ |
| Δ600-655 | YLDSIAPEHYYGGGGFSIMQFSLQALYEEFIKAKNWWTNTNC |
| | FLPLVRYMGCSFKFYKTEFYDYIVLIERCYPLACTDEMYLSTQ |
| | PSIMMLTRKCIFVPCKQNSKGKKPYKKVRVRPPSQMTTGWHF |
| | SQDLANMPLVVLKTSVCSFDRYYTDSTAKSTTIGFKTLNTQTF |
| | RYHDWQEPPTTGYKPQNLLWFYGAENGSPVDPNNTIVSNLIY |
| | LGGTGPYEKGTPIKTNISNYFSEPKLWGNIFHDDYTSGTSPVF |
| | VTNKSPSEIKTAWNTIKDLTVKASGVFTLRTIPLWLPCRYNPF |
| | ADKATNNKIWLVSIHSDHTEWKPIDNPLLQRTDLPLWLLVWG |
| | WQDWQKKNQQTSQPDINYLTVISSPYISCYPKLDYYVLLDEG |
| | FWEGHSTYIESITDSDKKHWYPKNRFQIETLNLIANTGPGTVK |
| | LRENQAAEGHMVYRFNFKLGGCPAPMEKICDPSKQSKYPIPN |
| | NQQQTTSLQSPENPIQTYLYDFDERRGLLTERATKRIKQDHTS |
| | EKTVLPGSSGSAGSSGSAGSSGSALEVLFEGPGSYPYDVPDYA |
| | (SEQ ID NO: 2597) |
| Ring_19_Cterm | MPWYPRRRYPRRRYRWLRRWRARRPFRPRYRRRYWVRNYS |
| 599_SL_FLAG | RKRKLFKITTKEWQPKVIRKTHVKGTYPLFLCTKHRINNNMIQ |
| Δ600-655 | YLDSIAPEHYYGGGGFSIMQFSLQALYEEFIKAKNWWTNTNC |
| | FLPLVRYMGCSFKFYKTEFYDYIVLIERCYPLACTDEMYLSTQ |
| | PSIMMLTRKCIFVPCKQNSKGKKPYKKVRVRPPSQMTTGWHF |
| | SQDLANMPLVVLKTSVCSFDRYYTDSTAKSTTIGFKTLNTQTF |
| | RYHDWQEPPTTGYKPQNLLWFYGAENGSPVDPNNTIVSNLIY |
| | LGGTGPYEKGTPIKTNISNYFSEPKLWGNIFHDDYTSGTSPVF |
| | VTNKSPSEIKTAWNTIKDLTVKASGVFTLRTIPLWLPCRYNPF |
| | ADKATNNKIWLVSIHSDHTEWKPIDNPLLQRTDLPLWLLVWG |
| | WQDWQKKNQQTSQPDINYLTVISSPYISCYPKLDYYVLLDEG |
| | FWEGHSTYIESITDSDKKHWYPKNRFQIETLNLIANTGPGTVK |
| | LRENQAAEGHMVYRFNFKLGGCPAPMEKICDPSKQSKYPIPN |
| | NQQQTTSLQSPENPIQTYLYDFDERRGLLTERATKRIKQDHTS |
| | EKTVLPGSSGSALEVLFEGPGSDYKDDDDK (SEQ ID NO: 2598) |
| Ring_19_Cterm | MPWYPRRRYPRRRYRWLRRWRARRPFRPRYRRRYWVRNYS |
| 599_LL_FLAG | RKRKLFKITTKEWQPKVIRKTHVKGTYPLFLCTKHRINNNMIQ |
| Δ600-655 | YLDSIAPEHYYGGGGFSIMQFSLQALYEEFIKAKNWWTNTNC |
| | FLPLVRYMGCSFKFYKTEFYDYIVLIERCYPLACTDEMYLSTQ |
| | PSIMMLTRKCIFVPCKQNSKGKKPYKKVRVRPPSQMTTGWHF |
| | SQDLANMPLVVLKTSVCSFDRYYTDSTAKSTTIGFKTLNTQTF |
| | RYHDWQEPPTTGYKPQNLLWFYGAENGSPVDPNNTIVSNLIY |
| | LGGTGPYEKGTPIKTNISNYFSEPKLWGNIFHDDYTSGTSPVF |
| | VTNKSPSEIKTAWNTIKDLTVKASGVFTLRTIPLWLPCRYNPF |
| | ADKATNNKIWLVSIHSDHTEWKPIDNPLLQRTDLPLWLLVWG |
| | WQDWQKKNQQTSQPDINYLTVISSPYISCYPKLDYYVLLDEG |
| | FWEGHSTYIESITDSDKKHWYPKNRFQIETLNLIANTGPGTVK |
| | LRENQAAEGHMVYRFNFKLGGCPAPMEKICDPSKQSKYPIPN |
| | NQQQTTSLQSPENPIQTYLYDFDERRGLLTERATKRIKQDHTS |
| | EKTVLPGSSGSAGSSGSAGSSGSALEVLFEGPGSDYKDDDDK |
| | (SEQ ID NO: 2599) |

TABLE B4-1
Replacement of Ring 10 structural
arginine-rich region with BFDV ARM

| | |
|---|---|
| 1. Ring10 | MWGTSNCACAKFQIRRRYARPYRRRHIRRYRRRRRH |
| ARM | FRRRRFTTNRKIKRLNIVEWQPKSIRKCRIKGMLCL |
| replaced with | FQTTEDRLSYNFDMYEESIIPEKLPGGGGFSIKNIS |
| BFDV (1-44) | LYALYQEHIHAHNIFTHTNTDRPLARYTGCSLKFYQ |
| | SKDIDYVVTYSTSLPLRSSMGMYNSMQPSIHLMQQN |
| | KLIVPSKQTQKRRKPYIKKHISPPTQMKSQWYFQHN |
| | IANIPLLMIRTTALTLDNYYIGSRQLSTNVTIHTLN |
| | TTYIQNRDWGDRNKTYYCQTLGTQRYFLYGTHSTAQ |
| | NINDIKLQELIPLTNTQDYVQGFDWTEKDKHNITTY |
| | KEFLTKGAGNPFHAEWITAQNPVIHTANSPTQIEQI |
| | YTASTTTFQNKKLTDLPTPGYIFITPTVSLRYNPYK |
| | DLAERNKCYFVRSKINAHGWDPEQHQELINSDLPQW |
| | LLLFGYPDYIKRTQNFALVDTNYILVDHCPYTNPEK |
| | TPFIPLSTSFIEGRSPYSPSDTHEPDEEDQNRWYPC |
| | YQYQQESINSICLSGPGTPKIPKGITAEAKVKYSFN |
| | FKWGGDLPPMSTITNPTDQPTYVVPNNFNETTSLQN |
| | PTTRPEHFLYSFDERRGQLTEKATKRLLKDWETKET |
| | SLLSTEYRFAEPTQTQAPQEDPSSEEEEESNLFERL |
| | LRQRTKQLQLKRRIIQTLKDLQKLE |
| | (SEQ ID NO: 2600) |

TABLE B4-2
Interchange between different Anellovirus
sequences, e.g., between Ring 2 and 9

| # ID | Sequence |
|---|---|
| (1426) Ring 2 | MGSSHHHHHHGSDYKDDDDKSGSLEVLFQGPSGATMPYYYR |
| Nterminal | RR |
| HISFLAG- | RYNYRRPRWYGRGWIRRPFRRRFRRKRRVRPTYTTIPLKQW |
| 3CProtease- | QPPYKRTCYIKGQDCLIYYSNLRLGMNSTMYEKSIVPVHWP |
| ORF1 | GGGSFSVSMLTLDALYDIHKLCRNWWTSTNQDLPLVRYKGC |
| | KITFYQSTFTDYIVRIHTELPANSNKLTYPNTHPLMMMMSK |
| | YKHIIPSRQTRRKKKPYTKIFVKPPPQFENKWYFATDLYKI |
| | PLLQIHCTACNLQNPFVKPDKLSNNVTLWSLNTISIQNRNM |
| | SVDQGQSWPFKILGTQSFYFYFYTGANLPGDTTQIPVADLL |
| | PLTNPRINRPGQSLNEAKITDHITFTEYKNKFTNYWGNPFN |
| | KHIQEHLDMILYSLKSPEAIKNEWTTENMKWNQLNNAGTMA |
| | LTPFNEPIFTQIQYNPDRDTGEDTQLYLLSNATGTGWDPPG |
| | IPELILEGFPLWLIYWGFADFQKNLKKVTNIDTNYMLVAKT |
| | KFTQKPGTFYLVILNDTFVEGNSPYEKQPLPEDNIKWYPQV |
| | QYQLEAQNKLLQTGPFTPNIQGQLSDNISMFYKFYFKWGGS |
| | PPKAINVENPAHQIQYPIPRNEHETTSLQSPGEAPESILYS |
| | FDYRHGNYTTTALSRISQDWALKDTVSKITEPDRQQLLKQA |
| | LECLQISEETQEKKEKEVQQLISNLRQQQQLYRERIISLLK |
| | DQ (SEQ ID NO: 2601) |
| (1433) Ring 9 | MGSSHHHHHHGSDYKDDDDKSGSLEVLFQGPSGATMPPYWR |
| Nterminal | QK |
| HISFLAG- | YYRRRYRPFSWRTRRIIQRRKRWRYRKPRKTYWRRKLRVRK |
| 3CProtease- | RFYKRKLKKIVLKQFQPKIIRRCTIFGTICLFQGSPERANN |
| ORF1 | NYIQTIYSYVPDKEPGGGGWTLITESLSSLWEDWEHLKNVW |
| | TQSNAGLPLVRYGGVTLYFYQSAYTDYIAQVENCYPMTDTK |
| | YTHADSAPNRMLLKKHVIRVPSRETRKKRKPYKRVRVGPPS |
| | QMQNKWYFQRDICEIPLIMIAATAVDFRYPFCASDCASNNL |
| | TLTCLNPLLFQNQDFDHPSDTQGYFPKPGVYLYSTQRSNKP |
| | SSSDCIYLGNTKDNQEGKSASSLMTLKTQKITDWGNPFWHY |
| | YIDGSKKIFSYFKPPSQLDSSDFEHMTELAEPMFIQVRYNP |
| | ERDTGQGNLIYVTENFRGQHWDPPSSDNLKLDGFPLYDMCW |
| | GFIDWIEKVHETENLLTNYCFCIRSSAFNEKKTVFIPVDHS |
| | FLTGFSPYETPVKSSDQAHWHPQIRFQTKSINDICLTGPGC |
| | ARSPYGNYMQAKMSYKFHVKWGGCPKTYEKPYDPCSQPNWT |
| | IPHNLNETIQIQNPNTCPQTELQEWDWRRDIVTKKAIERIR |
| | QHTEPHETLQISTGSKHNPPVHRQTSPWTDSETDSEEEKDQ |
| | TQEIQIQLNKLRKHQQHLKQQLKQYLKPQNIE (SEQ ID NO: 2602) |
| (1707) Ring 2 | MPPYWRQKYYRRRYRPFSWRTRRIIQRRKRWRYRKPRKTY |
| ORF1 | WRRKLRVRK |
| with ARG arm | RRVRPTYTTIPLKQWQPPYKRTCYIKGQDCLIYYSNLRLGM |
| of Ring 9 (Ring | NSTMYEKSIVPVHWPGGGSFSVSMLTLDALYDIHKLCRNWWTST |
| 291) | NQDLPLVRYKGCKITFYQSTFTDYIVRIHTELPANSNK |
| | LTYPNTHPLMMMMSKYKHIIPSRQTRRKKKPYTKIFVKPPP |
| | QFENKWYFATDLYKIPLLQIHCTACNLQNPFVKPDKLSNNV |
| | TLWSLNTISIQNRNMSVDQGQSWPFKILGTQSFYFYFYTGA |
| | NLPGDTTQIPVADLLPLTNPRINRPGQSLNEAKITDHITFT |
| | EYKNKFTNYWGNPFNKHIQEHLDMILYSLKSPEAIKNEWTT |
| | ENMKWNQLNNAGTMALTPFNEPIFTQIQYNPDRDTGEDTQL |
| | YLLSNATGTGWDPPGIPELILEGFPLWLIYWGFADFQKNLK |
| | KVTNIDTNYMLVAKTKFTQKPGTFYLVILNDTFVEGNSPYE |
| | KQPLPEDNIKWYPQVQYQLEAQNKLLQTGPFTPNIQGQLSD |
| | NISMFYKFYFKWGGSPPKAINVENPAHQIQYPIPRNEHETT |
| | SLQSPGEAPESILYSFDYRHGNYTTTALSRISQDWALKDTV |
| | SKITEPDRQQLLKQALECLQISEETQEKKEKEVQQLISNLR |
| | QQQQLYRERIISLLKDQ (SEQ ID NO: 2603) |
| (1708) Ring 2 | MPPYWRQK |
| ORF1 | YYRRRYRPFSWRTRRIIQRRKRWRYRKPRKTYWRRKLRVRK |
| with ARG arm | RFYKRKLKKIVLKQFQPKIIRRCTIFGTICLFQGSNLRLGM |
| and Beta strands | NSTMYEKSIVPVHWPGGGSFSVSMLTLDALYDIHKLCRNWW |
| 1 + 2 722 | TSTNQDLPLVRYKGCKITFYQSTFTDYIVRIHTELPANSNK |
| epitope of Ring | LTYPNTHPLMMMMSKYKHIIPSRQTRRKKKPYTKIFVKPPP |
| 9 | QFENKWYFATDLYKIPLLQIHCTACNLQNPFVKPDKLSNNV |
| | TLWSLNTISIQNRNMSVDQGQSWPFKILGTQSFYFYFYTGA |
| | NLPGDTTQIPVADLLPLTNPRINRPGQSLNEAKITDHITFT |
| | EYKNKFTNYWGNPFNKHIQEHLDMILYSLKSPEAIKNEWTT |
| | ENMKWNQLNNAGTMALTPFNEPIFTQIQYNPDRDTGEDTQL |
| | YLLSNATGTGWDPPGIPELILEGFPLWLIYWGFADFQKNLK |
| | KVTNIDTNYMLVAKTKFTQKPGTFYLVILNDTFVEGNSPYE |
| | KQPLPEDNIKWYPQVQYQLEAQNKLLQTGPFTPNIQGQLSD |
| | NISMFYKFYFKWGGSPPKAINVENPAHQIQYPIPRNEHETT |
| | SLQSPGEAPESILYSFDYRHGNYTTTALSRISQDWALKDTV |
| | SKITEPDRQQLLKQALECLQISEETQEKKEKEVQQLISNLR |
| | QQQQLYRERIISLLKDQ (SEQ ID NO: 2604) |
| 3. (1721) Ring 9 | MPPYWRQKYYRRRYRPFSWRTRRIIQRRHRWRYRKPRHTYWRR |
| with LYS/HIS | HLRVRHRFYHRHLHHIVLKQFQPKIIRRCTIFGTICLFQGSPERAN |
| mutations in ARG | NNYIQTIYSYVPDKEPGGGGWTLITESLSSLWEDWEHLKNVWTQ |
| arm and first beta | SNAGLPLVRYGGVTLYFYQSAYTDYIAQVENCYPMTDTKYTHA |
| strand | DSAPNRMLLKKHVIRVPSRETRKKRKPYKRVRVGPPSQMQNKW |
| | YFQRDICEIPLIMIAATAVDFRYPFCASDCASNNLTLTCLNPLLFQ |
| | NQDFDHPSDTQGYFPKPGVYLYSTQRSNKPSSSDCIYLGNTKDNQ |
| | EGKSASSLMTLKTQKITDWGNPFWHYYIDGSKKIFSYFKPPSQLD |
| | SSDFEHMTELAEPMFIQVRYNPERDTGQGNLIYVTENFRGQHWD |
| | PPSSDNLKLDGFPLYDMCWGFIDWIEKVHETENLLTNYCFCIRSS |
| | AFNEKKTVFIPVDHSFLTGFSPYETPVKSSDQAHWHPQIRFQTKSI |
| | NDICLTGPGCARSPYGNYMQAKMSYKFHVKWGGCPKTYEKPYD |
| | PCSQPNWTIPHNLNETIQIQNPNTCPQTELQEWDWRRDIVTKKAI |
| | ERIRQHTEPHETLQISTGSKHNPPVHRQTSPWTDSETDSEEEKDQT |
| | QEIQIQLNKLRKHQQHLKQQLKQYLKPQNIE (SEQ ID NO: 2605) |
| 4. (1722) Ring 9 | MWGTSNCACAKFQIRRRYARPYRRRHIRRYRRRRRHFRRRR |
| with ARG arm of | FTTNRRKRFYKRKLKKIVLKQFQPKIIRRCTIFGTICLFQGSPERA |
| BFDV | NNNYIQTIYSYVPDKEPGGGGWTLITESLSSLWEDWEHLKNVWT |
| | QSNAGLPLVRYGGVTLYFYQSAYTDYIAQVENCYPMTDTKYTH |
| | ADSAPNRMLLKKHVIRVPSRETRKKRKPYKRVRVGPPSQMQNK |
| | WYFQRDICEIPLIMIAATAVDFRYPFCASDCASNNLTLTCLNPLLF |
| | QNQDFDHPSDTQGYFPKPGVYLYSTQRSNKPSSSDCIYLGNTKDN |
| | QEGKSASSLMTLKTQKITDWGNPFWHYYIDGSKKIFSYFKPPSQL |
| | DSSDFEHMTELAEPMFIQVRYNPERDTGQGNLIYVTENFRGQHW |
| | DPPSSDNLKLDGFPLYDMCWGFIDWIEKVHETENLLTNYCFCIRS |
| | SAFNEKKTVFIPVDHSFLTGFSPYETPVKSSDQAHWHPQIRFQTKS |
| | INDICLTGPGCARSPYGNYMQAKMSYKFHVKWGGCPKTYEKPY |
| | DPCSQPNWTIPHNLNETIQIQNPNTCPQTELQEWDWRRDIVTKKA |
| | IERIRQHTEPHETLQISTGSKHNPPVHRQTSPWTDSETDSEEEKDQ |
| | TQEIQIQLNKLRKHQQHLKQQLKQYLKPQNIE (SEQ ID NO: 2606) |
| 5. (1723) Ring 9 | MPPYWRQKYYRRRYRPFSWRTRRIIQRRKRWRYRKPRKTYWRR |
| with beta strands F | KLRVRKRFYKRKLKKIVLKQFQPKIIRRCTIFGTICLFQGSPERAN |
| and G of BFDV | NNYIQTIYSYVPDKEPGGGGWTLITESLSSLWEDWEHLKNVWTQ |
| capsid protein | SNAGLPLVRYGGVTLYFYQSAYTDYIAQVENCYPMTDTKYTHA |
| | DSAPNRMLLKKHAKKWFSRETRKKRKPGFKRLLGPPSQMQNK |
| | WYFQRDICEIPLIMIAATAVDFRYPFCASDCASNNLTLTCLNPLLF |
| | QNQDFDHPSDTQGYFPKPGVYLYSTQRSNKPSSSDCIYLGNTKDN |
| | QEGKSASSLMTLKTQKITDWGNPFWHYYIDGSKKIFSYFKPPSQL |
| | DSSDFEHMTELAEPMFIQVRYNPERDTGQGNLIYVTENFRGQHW |
| | DPPSSDNLKLDGFPLYDMCWGFIDWIEKVHETENLLTNYCFCIRS |
| | SAFNEKKTVFIPVDHSFLTGFSPYETPVKSSDQAHWHPQIRFQTKS |
| | INDICLTGPGCARSPYGNYMQAKMSYKFHVKWGGCPKTYEKPY |
| | DPCSQPNWTIPHNLNETIQIQNPNTCPQTELQEWDWRRDIVTKKA |
| | IERIRQHTEPHETLQISTGSKHNPPVHRQTSPWTDSETDSEEEKDQ |
| | TQEIQIQLNKLRKHQQHLKQQLKQYLKPQNIE (SEQ ID NO: 2607) |
| 6. (1724) Ring 2 | MPYYYRRRRYNYRRPRWYGRGWIRRPFRRRFRRKRRVRPTYTTI |
| with beta C of | PLKQWQPPYKRRCTIFGTICLFQGSNLRLGMNSTMYEKSIVPVH |
| Ring 9 | WPGGGSFSVSMLTLDALYDIHKLCRNWWTSTNQDLPLVRYKGC |
| | KITFYQSTFTDYIVRIHTELPANSNKLTYPNTHPLMMMMSKYKHII |
| | PSRQTRRKKKPYTKIFVKPPPQFENKWYFATDLYKIPLLQIHCTAC |
| | NLQNPFVKPDKLSNNVTLWSLNTISIQNRNMSVDQGQSWPFKILG |
| | TQSFYFYFYTGANLPGDTTQIPVADLLPLTNPRINRPGQSLNEAKI |
| | TDHITFTEYKNKFTNYWGNPFNKHIQEHLDMILYSLKSPEAIKNE |
| | WTTENMKWNQLNNAGTMALTPFNEPIFTQIQYNPDRDTGEDTQL |
| | YLLSNATGTGWDPPGIPELILEGFPLWLIYWGFADFQKNLKKVTN |
| | IDTNYMLVAKTKFTQKPGTFYLVILNDTFVEGNSPYEKQPLPEDN |
| | IKWYPQVQYQLEAQNKLLQTGPFTPNIQGQLSDNISMFYKFYFK |
| | WGGSPPKAINVENPAHQIQYPIPRNEHETTSLQSPGEAPESILYSFD |
| | YRHGNYTTTALSRISQDWALKDTVSKITEPDRQQLLKQALECLQI |
| | SEETQEKKEKEVQQLISNLRQQQQLYRERIISLLKDQ |
| | (SEQ ID NO: 2608) |
| 7. | MPYYYRRRRYNYRRPRWYGRGWIRRPFRRRFRRKRRVRPTYTTI |
| (1725) Ring 2 with | PLKQWQPPYKRTCYIKGQDCLIYYSPERANNNYIQTIYSYVPDK |
| linker 1 of Ring 9 | EPGGGGWTLITESLSSLWEDWEHLKNVWTQSNAGLPLVRYK |
| | GCKITFYQSTFTDYIVRIHTELPANSNKLTYPNTHPLMMMMSKYK |
| | HIIPSRQTRRKKKPYTKIFVKPPPQFENKWYFATDLYKIPLLQIHCT |
| | ACNLQNPFVKPDKLSNNVTLWSLNTISIQNRNMSVDQGQSWPFK |
| | ILGTQSFYFYFYTGANLPGDTTQIPVADLLPLTNPRINRPGQSLNE |
| | AKITDHITFTEYKNKFTNYWGNPFNKHIQEHLDMILYSLKSPEAIK |
| | NEWTTENMKWNQLNNAGTMALTPFNEPIFTQIQYNPDRDTGEDT |
| | QLYLLSNATGTGWDPPGIPELILEGFPLWLIYWGFADFQKNLKKV |
| | TNIDTNYMLVAKTKFTQKPGTFYLVILNDTFVEGNSPYEKQPLPE |
| | DNIKWYPQVQYQLEAQNKLLQTGPFTPNIQGQLSDNISMFYKFYF |
| | KWGGSPPKAINVENPAHQIQYPIPRNEHETTSLQSPGEAPESILYSF |
| | DYRHGNYTTTALSRISQDWALKDTVSKITEPDRQQLLKQALECL |
| | QISEETQEKKEKEVQQLISNLRQQQQLYRERIISLLKDQ |
| | (SEQ ID NO: 2609) |
| 8. (1726) Ring 2 | MPYYYRRRRYNYRRPRWYGRGWIRRPFRRRFRRKRRVRPTYTTI |
| with beta strand D | PLKQWQPPYKRTCYIKGQDCLIYYSNLRLGMNSTMYEKSIVPVH |
| of Ring 9 | WPGGGSFSVSMLTLDALYDIHKLCRNWWTSTNQDLPLVRYGG |
| | VTLYFYQSTFTDYIVRIHTELPANSNKLTYPNTHPLMMMMSKYK |
| | HIIPSRQTRRKKKPYTKIFVKPPPQFENKWYFATDLYKIPLLQIHCT |
| | ACNLQNPFVKPDKLSNNVTLWSLNTISIQNRNMSVDQGQSWPFK |
| | ILGTQSFYFYFYTGANLPGDTTQIPVADLLPLTNPRINRPGQSLNE |
| | AKITDHITFTEYKNKFTNYWGNPFNKHIQEHLDMILYSLKSPEAIK |
| | NEWTTENMKWNQLNNAGTMALTPFNEPIFTQIQYNPDRDTGEDT |
| | QLYLLSNATGTGWDPPGIPELILEGFPLWLIYWGFADFQKNLKKV |
| | TNIDTNYMLVAKTKFTQKPGTFYLVILNDTFVEGNSPYEKQPLPE |
| | DNIKWYPQVQYQLEAQNKLLQTGPFTPNIQGQLSDNISMFYKFYF |
| | KWGGSPPKAINVENPAHQIQYPIPRNEHETTSLQSPGEAPESILYSF |
| | DYRHGNYTTTALSRISQDWALKDTVSKITEPDRQQLLKQALECL |
| | QISEETQEKKEKEVQQLISNLRQQQQLYRERIISLLKDQ |
| | (SEQ ID NO: 2610) |
| 9. (1727) Ring 2 | MPYYYRRRRYNYRRPRWYGRGWIRRPFRRRFRRKRRVRPTYTTI |
| with linker 2 of | PLKQWQPPYKRTCYIKGQDCLIYYSNLRLGMNSTMYEKSIVPVH |
| Ring 9 | WPGGGSFSVSMLTLDALYDIHKLCRNWWTSTNQDLPLVRYKGC |
| | KITFYQSTFTDYIVRIHNCYPMTDTKYTHADSAPNRMLLKKHK |
| | HIIPSRQTRRKKKPYTKIFVKPPPQFENKWYFATDLYKIPLLQIHCT |
| | ACNLQNPFVKPDKLSNNVTLWSLNTISIQNRNMSVDQGQSWPFK |
| | ILGTQSFYFYFYTGANLPGDTTQIPVADLLPLTNPRINRPGQSLNE |
| | AKITDHITFTEYKNKFTNYWGNPFNKHIQEHLDMILYSLKSPEAIK |
| | NEWTTENMKWNQLNNAGTMALTPFNEPIFTQIQYNPDRDTGEDT |
| | QLYLLSNATGTGWDPPGIPELILEGFPLWLIYWGFADFQKNLKKV |
| | TNIDTNYMLVAKTKFTQKPGTFYLVILNDTFVEGNSPYEKQPLPE |
| | DNIKWYPQVQYQLEAQNKLLQTGPFTPNIQGQLSDNISMFYKFYF |
| | KWGGSPPKAINVENPAHQIQYPIPRNEHETTSLQSPGEAPESILYSF |
| | DYRHGNYTTTALSRISQDWALKDTVSKITEPDRQQLLKQALECL |
| | QISEETQEKKEKEVQQLISNLRQQQQLYRERIISLLKDQ |
| | (SEQ ID NO: 2611) |
| 10. (1728) Ring 2 | MPYYYRRRRYNYRRPRWYGRGWIRRPFRRRFRRKRRVRPTYTTI |
| with beta strand G | PLKQWQPPYKRTCYIKGQDCLIYYSNLRLGMNSTMYEKSIVPVH |
| DNA binding of | WPGGGSFSVSMLTLDALYDIHKLCRNWWTSTNQDLPLVRYKGC |
| Ring 9 | KITFYQSTFTDYIVRIHTELPANSNKLTYPNTHPLMMMMSKYKHII |
| | PSRQTRRKKKPYKRVRVKPPPQFENKWYFATDLYKIPLLQIHCT |
| | ACNLQNPFVKPDKLSNNVTLWSLNTISIQNRNMSVDQGQSWPFK |
| | ILGTQSFYFYFYTGANLPGDTTQIPVADLLPLTNPRINRPGQSLNE |
| | AKITDHITFTEYKNKFTNYWGNPFNKHIQEHLDMILYSLKSPEAIK |
| | NEWTTENMKWNQLNNAGTMALTPFNEPIFTQIQYNPDRDTGEDT |
| | QLYLLSNATGTGWDPPGIPELILEGFPLWLIYWGFADFQKNLKKV |
| | TNIDTNYMLVAKTKFTQKPGTFYLVILNDTFVEGNSPYEKQPLPE |
| | DNIKWYPQVQYQLEAQNKLLQTGPFTPNIQGQLSDNISMFYKFYF |
| | KWGGSPPKAINVENPAHQIQYPIPRNEHETTSLQSPGEAPESILYSF |
| | DYRHGNYTTTALSRISQDWALKDTVSKITEPDRQQLLKQALECL |
| | QISEETQEKKEKEVQQLISNLRQQQQLYRERIISLLKDQ |
| | (SEQ ID NO: 2773) |
| 11. (1729) Ring 2 | MPYYYRRRRYNYRRPRWYGRGWIRRPFRRRFRRKRRVRPTYTTI |
| with beta strand F | PLKQWQPPYKRTCYIKGQDCLIYYSNLRLGMNSTMYEKSIVPVH |
| interprotomer | WPGGGSFSVSMLTLDALYDIHKLCRNWWTSTNQDLPLVRYKGC |
| contact of Ring 9 | KITFYQSTFTDYIVRIHTELPANSNKLTYPNTHPLMMMMSKHVIR |
| | VPSRQTRRKKKPYTKIFVKPPPQFENKWYFATDLYKIPLLQIHCT |
| | ACNLQNPFVKPDKLSNNVTLWSLNTISIQNRNMSVDQGQSWPFK |
| | ILGTQSFYFYFYTGANLPGDTTQIPVADLLPLTNPRINRPGQSLNE |
| | AKITDHITFTEYKNKFTNYWGNPFNKHIQEHLDMILYSLKSPEAIK |
| | NEWTTENMKWNQLNNAGTMALTPFNEPIFTQIQYNPDRDTGEDT |
| | QLYLLSNATGTGWDPPGIPELILEGFPLWLIYWGFADFQKNLKKV |
| | TNIDTNYMLVAKTKFTQKPGTFYLVILNDTFVEGNSPYEKQPLPE |
| | DNIKWYPQVQYQLEAQNKLLQTGPFTPNIQGQLSDNISMFYKFYF |
| | KWGGSPPKAINVENPAHQIQYPIPRNEHETTSLQSPGEAPESILYSF |
| | DYRHGNYTTTALSRISQDWALKDTVSKITEPDRQQLLKQALECL |
| | QISEETQEKKEKEVQQLISNLRQQQQLYRERIISLLKDQ |
| | (SEQ ID NO: 2612) |
| 12. (1730) Ring 2 | MPYYYRRRRYNYRRPRWYGRGWIRRPFRRRFRRKRRVRPTYTTI |
| ORF1 with strand | PLKQWQPPYKRTCYIKGQDCLIYYSNLRLGMNSTMYEKSIVPVH |
| H and I with C- | WPGGGSFSVSMLTLDALYDIHKLCRNWWTSTNQDLPLVRYKGC |
| terminal fragment | KITFYQSTFTDYIVRIHTELPANSNKLTYPNTHPLMMMMSKYKHII |
| of Ring 9 | PSRQTRRKKKPYTKIFVKPPPQFENKWYFATDLYKIPLIMIAATA |
| | VDFRYPFCASDCASNNLTLTCLNPLLFQNQDFDHPSDTQGYFP |
| | KPGVYLYSTQRSNKPSSSDCIYLGNTKDNQEGKSASSLMTLKT |
| | QKITDWGNPFWHYYIDGSKKIFSYFKPPSQLDSSDFEHMTELA |
| | EPMFIQVRYNPERDTGQGNLIYVTENFRGQHWDPPSSDNLKL |
| | DGFPLYDMCWGFIDWIEKVHETENLLTNYCFCIRSSAFNEKK |
| | TVFIPVDHSFLTGFSPYETPVKSSDQAHWHPQIRFQTKSINDIC |
| | LTGPGCARSPYGNYMQAKMSYKFHVKWGGCPKTYEKPYDP |
| | CSQPNWTIPHNLNETIQIQNPNTCPQTELQEWDWRRDIVTKK |
| | AIERIRQHTEPHETLQISTGSKHNPPVHRQTSPWTDSETDSEE |
| | EKDQTQEIQIQLNKLRKHQQHLKQQLKQYLKPQNIE |
| | (SEQ ID NO: 2613) |

TABLE B4-3
Replacement of hepatitis E virus domains with Anellovirus P2 domain. The engineering
of virus capsid protein could expand tropism and alleviate severe immune response.
Hepatitis E virus (HEV) is an non-enveloped RNA virus which contains
three structural domains: S (shell), M (middle) and P (protruding)
domains. Here we propose to swap HEV domains with Anellovirus P2 domain to
pursue another novel VLP for encapsulation of mRNA payload.

| | |
|---|---|
| HEV P domain (462-608) | MAVAPAPDTAPVPDVDSRGAILRRQYNLSTSPLTSTIATGTNL |
| replaced with | VLYAAPLSSLLPLQDGTNTHIMATEASNYAQYRVVRATIRYR |
| Anellovirus P2 (250- | PLVPSAVGGYAISISFWPQTTTTPTSVDMNSITSTDVRILVQPGI |
| 387) | ASELVIPSERLHYRNQGWRSVETSGVAEEEATSGLVMLCIHGS |
| | PVNSYTNTPYTGALGLLDFALELEFRNLTPGNTNTRVSRYSSS |
| | ARHKLRRGPDGTAELTTTAATRFMKDLHFTGTNDVGEVGRG |
| | IALTLFNLADTLLGGLPTELISSAGGQLFYSRPVVSANGEPTVK |
| | LYTSVENAQQDKGIAIPHDIDLGESRVVIQDYDNQHEQDRPTP |
| | SPAPSRPLNTTYIQNRDWGDRNKTYYCQTLGTQRYFLYGT |
| | HSTAQNINDIKLQELIPLTNTQDYVQGFDWTEKDKHNITT |
| | YKEFLTKGAGNPFHAEWITAQNPVIHTANSPTQIEQIYTAS |
| | TTTFQNKKLTDLPTPGYIFITPTVHHHHH (SEQ ID NO: 2614) |

Identification of ORF1 protein sequences

[1746] In some embodiments, an ORF1 protein sequence, or a nucleic acid sequence encoding an ORF1 protein, can be identified from the genome of an Anelloviridae family virus, e.g., an Anellovirus (e.g., a putative Anelloviridae family virus genome identified, for example, by nucleic acid sequencing techniques, e.g., deep sequencing techniques). In some embodiments, an ORF1 protein sequence is identified by one or more (e.g., 1, 2, or all 3) of the following selection criteria:

[1747] (i) Length Selection: Protein sequences (e.g., putative ORF1 sequences passing the criteria described in (ii) or (iii) below) may be size-selected for those greater than about 600 amino acid residues to identify putative ORF1 proteins. In some embodiments, an ORF1 protein sequence is at least about 600, 650, 700, 750, 800, 850, 900, 950, or 1000 amino acid residues in length. In some embodiments, an Alphatorquevirus ORF1 protein sequence is at least about 700, 710, 720, 730, 740, 750, 760, 770, 780, 790, 800, 900, or 1000 amino acid residues in length. In some embodiments, a Betatorquevirus ORF1 protein sequence is at least about 650, 660, 670, 680, 690, 700, 750, 800, 900, or 1000 amino acid residues in length. In some embodiments, a Gammatorquevirus ORF1 protein sequence is at least about 650, 660, 670, 680, 690, 700, 750, 800, 900, or 1000 amino acid residues in length. In some embodiments, a nucleic acid sequence encoding an ORF1 protein is at least about 1800, 1900, 2000, 2100, 2200, 2300, 2400, or 2500 nucleotides in length. In some embodiments, a nucleic acid sequence encoding an Alphatorquevirus ORF1 protein sequence is at least about 2100, 2150, 2200, 2250, 2300, 2400, or 2500 nucleotides in length. In some embodiments, a nucleic acid sequence encoding a Betatorquevirus ORF1 protein sequence is at least about 1900, 1950, 2000, 2500, 2100, 2150, 2200, 2250, 2300, 2400, or 2500 or 1000 nucleotides in length. In some embodiments, a nucleic acid sequence encoding a Gammatorquevirus ORF1 protein sequence is at least about 1900, 1950, 2000, 2500, 2100, 2150, 2200, 2250, 2300, 2400, or 2500 or 1000 nucleotides in length.

[1748] (ii) Presence of ORF1 motif Protein sequences (e.g., putative ORF1 sequences passing the criteria described in (i) above or (iii) below) may be filtered to identify those that contain the conserved ORF1 motif in the structural N22 domain described above. In some embodiments, a putative Anellovirus ORF1 sequence comprises the sequence YNPXXDXGXXN (SEQ ID NO: 2615). In some embodiments, a putative Anellovirus ORF1 sequence comprises the sequence Y[NCS]PXXDX[GASKR]XX[NTSVAK].

[1749] (iii) Presence of arginine-rich region: Protein sequences (e.g., putative ORF1 sequences passing the criteria described in (i) and/or (ii) above) may be filtered for those that include a structural arginine-rich region (e.g., as described herein). In some embodiments, a putative ORF1 sequence comprises a contiguous sequence of at least about 30, 35, 40, 45, 50, 55, 60, 65, or 70 amino acids that comprises at least 30% (e.g., at least about 20%, 25%, 30%, 35%, 40%, 45%, or 50%) arginine residues. In some embodiments, a putative ORF1 sequence comprises a contiguous sequence of about 35-40, 40-45, 45-50, 50-55, 55-60, 60-65, or 65-70 amino acids that comprises at least 30% (e.g., at least about 20%, 25%, 30%, 35%, 40%, 45%, or 50%) arginine residues. In some embodiments, the structural arginine-rich region is positioned at least about 30, 40, 50, 60, 70, or 80 amino acids downstream of the start codon of the putative ORF1 protein. In some embodiments, the structural arginine-rich region is positioned at least about 50 amino acids downstream of the start codon of the putative ORF1 protein.

[1750] In some embodiments, an ORF1 protein is identified in an Anellovirus genome sequence as described in Example 36 of PCT Publication No. WO2020/123816 (incorporated herein by reference in its entirety).

### Structural Arginine-Rich Region Deletions and Truncations

[1751] In some embodiments, an ORF1 molecule as described herein comprises a deletion or truncation of a structural arginine-rich region. In some embodiments, the entire structural arginine-rich region is deleted. In embodiments, the ORF1 molecule does not comprise an Anellovirus ORF1 structural arginine-rich region, or an amino acid sequence having at least 70%, 75%, 80%, 8%, 90%, 95%, 96%, 97%, 98%, or 99% sequence identity thereto. In embodiments, the ORF1 molecule does not comprise the amino acid sequence of the full-length structural arginine-rich region of an Ring2, Ring9, Ring10, Ring 18, or Ring19 Anellovirus ORF1 protein (e.g., as described herein). In some embodiments, the ORF1 molecule as described herein does not comprise a sequence of at least 35, 36, 37, 38, 39, 40, 41, 42, 43, 44, 45, 46, 47, 48, 49, 50, 51, 52, 53, 54, 55, 56, 57, 58, 59, 60, 61, 62, 63, 64, 65, 66, 67, 68, 69, or 70 contiguous amino acids consisting of at least 40%, 41%, 42%, 43%, 44%, 45%, 46%, 47%, 48%, 49%, 50%, 51%, 52%, 53%, 54%, 55%, 56%, 57%, 58%, 59%, or 60% basic residues (e.g., arginine and/or lysine residues).

[1752] In some embodiments, a portion of the structural arginine-rich region (e.g., a N-terminal portion of the structural arginine-rich region) is deleted. In some embodiments, the ORF1 molecule comprises a portion of a structural arginine-rich region of an Anellovirus ORF1 molecule, which comprises a deletion of about 1-5, 5-10, 10-15, 15-20, 20-25, 25-30, 30-35, or 35-40 amino acids, e.g., at the N-terminal end, of the structural arginine-rich region, relative to a corresponding wild-type structural arginine-rich region of the Anellovirus ORF1 molecule, or an amino acid sequence having at least 70%, 75%, 80%, 8%, 90%, 95%, 96%, 97%, 98%, or 99% sequence identity thereto. In some embodiments, the ORF1 molecule does not comprise the 1, 2, 3, 4, 5, 6, 7, 8, 9 or 10 most N-terminal amino acid residues of the structural jelly-roll region of the Anellovirus ORF1 molecule other than the N-terminal methionine residue. It is understood that the ORF1 molecule generally comprises at its N-terminus a methionine residue, e.g., a methionine residues corresponding to the N-terminal methionine residue of an Anellovirus structural arginine-rich region

[1753] In embodiments, the ORF1 molecule comprises a portion of a structural arginine-rich region (e.g., an C-terminal portion of the structural arginine-rich region) consisting of between 1-5, 5-10, 10-15, 15-20, 20-25, 25-30, 30-35, or 35-40 contiguous amino acids of a structural arginine-rich region sequence as described herein, or an amino acid sequence having at least 70%, 75%, 80%, 8%, 90%, 95%, 96%, 97%, 98%, or 99% sequence identity thereto. In embodiments, the ORF1 molecule comprises a portion of a structural arginine-rich region of an Anellovirus ORF1 molecule, wherein the portion consists of the N-terminal most 30-40, 40-50, 50-60, 60-70 (e.g., about 69), 70-80, 80-90, 90-100 (e.g., about 93), or 100-110 amino acids of a corresponding wild-type structural arginine-rich region of an Anellovirus ORF1 molecule, or a sequence having at least 80%, 85%, 90%, 95%, 96%, 97%, 98%, or 99% identity thereto.

[1754] In some embodiments, an ORF1 molecule having a deletion or truncation of the structural arginine-rich region further comprises a deletion or truncation of at least a portion of a structural jelly-roll domain as described herein. In some embodiments, an ORF1 molecule having a deletion or truncation of the structural arginine-rich region further comprises a deletion or truncation of at least a portion of a jelly-roll B—H strands subdomain as described herein.

[1755] In some embodiments, an ORF1 molecule having a deletion or truncation of the structural arginine-rich region further comprises a deletion or truncation of at least a portion of a structural C-terminal domain (e.g., as described herein).

[1756] In some embodiments, an ORF1 molecule comprises an amino acid sequence comprising substitutions of at least 50%, 60%, 70%, 80%, or 90% of basic amino acids (e.g., arginines and/or lysines) relative to the structural arginine-rich region of a wild-type Anellovirus ORF1 molecule.

### Structural C-Terminal Domain Deletions and Truncations

[1757] In some embodiments, an ORF1 molecule as described herein comprises a deletion or truncation of a structural C-terminal domain (CTD). In some embodiments, the entire structural CTD is deleted. In embodiments, the ORF1 molecule does not comprise an Anellovirus ORF1 structural CTD, or an amino acid sequence having at least 70%, 75%, 80%, 85%, 90%, 95%, 96%, 97%, 98%, or 99% sequence identity thereto. In embodiments, the ORF1 molecule does not comprise the amino acid sequence of the full-length structural C-terminal domain of an Ring2, Ring9, Ring10, Ring 18, or Ring19 Anellovirus ORF1 protein (e.g., as described herein).

[1758] In some embodiments, a portion of the structural CTD (e.g., a C-terminal portion of the structural CTD) is deleted. In some embodiments, the ORF1 molecule comprises a portion of a structural C-terminal domain (CTD) of an Anellovirus ORF1 molecule, which comprises a deletion of about 20-30, 30-40 (e.g., about 37), 40-50 (e.g., about 55), 50-60, 60-70, 70-80, 80-90, 90-100, 100-110, 110-120, 120-130 (e.g., about 129), 130-140 (e.g., about 131), 140-150 (e.g., about 148), or 150-160 (e.g., about 155) amino acids at the C-terminal end of the structural CTD, relative to a corresponding wild-type structural CTD of the Anellovirus ORF1 molecule, or an amino acid sequence having at least 70%, 75%, 80%, 8%, 90%, 95%, 96%, 97%, 98%, or 99% sequence identity thereto.

[1759] In embodiments, the ORF1 molecule comprises a portion of a structural CTD (e.g., an N-terminal portion of the structural CTD) consisting of between 1-5, 5-10, 10-15, 15-20, 20-25, 25-30, 30-40, 40-50, 50-60, 60-70, 70-80, 80-90, 90-100, 100-110, 110-120, 120-130, 130-140, or 140-150 contiguous amino acids of a structural CTD sequence as described herein, or an amino acid sequence having at least 70%, 75%, 80%, 8%, 90%, 95%, 96%, 97%, 98%, or 99% sequence identity thereto. In embodiments, the ORF1 molecule comprises a portion of a structural CTD of an Anellovirus ORF1 molecule, wherein the portion consists of the N-terminal most 60-70 (e.g., about 69), 70-80, 80-90, 90-100 (e.g., about 93), or 100-110 amino acids of a corresponding wild-type structural CTD of an Anellovirus ORF1 molecule, or a sequence having at least 80%, 85%, 90%, 95%, 96%, 97%, 98%, or 99% identity thereto.

[1760] In some embodiments, an ORF1 molecule having a deletion or truncation of the structural CTD further comprises a deletion or truncation of at least a portion of a structural N22 domain as described herein. In some embodiments, an ORF1 molecule having a deletion or truncation of the structural CTD further comprises a deletion or truncation of at least a portion of a jelly-roll I strand subdomain and/or a P1-2 domain as described herein.

[1761] In some embodiments, an ORF1 molecule having a deletion or truncation of the structural CTD further comprises a deletion or truncation of at least a portion of a structural arginine-rich region (e.g., as described herein).

### Chimeric ORF1 Molecules

[1762] In some embodiments, an ORF1 molecule described herein comprises a heterologous amino acid sequence (e.g., an amino acid sequence from a protein other than an Anellovirus protein). In some embodiments, the ORF1 molecule comprises one or more deletions or truncations relative to a corresponding Anellovirus ORF1 protein (e.g., a deleteion or truncation of a structural arginine-rich region and/or a deleteion or truncation of a structural CTD, e.g., as described herein). In some embodiments, the heterologous amino acid sequence is inserted at or within 1, 2, 3, 4, 5, 6, 7, 8, 9, 10, 15, 20, 25, 30, 35, 40, 45, or 50 amino acid residues of the position of one of the deletions or truncations relative to the corresponding Anellovirus ORF1 protein. For example, the heterologous amino acid sequence can, in some instances, be inserted at the N-terminus of the ORF1 molecule (e.g., an ORF1 molecule comprising a deletion or truncation of the structural arginine-rich region, e.g., as described herein). In another example, the heterologous amino acid sequence can, in some instances, be inserted at the C-terminus of the ORF1 molecule (e.g., an ORF1 molecule comprising a deletion or truncation of the structural CTD, e.g., as described herein).

[1763] In some embodiments, the heterologous amino acid sequence is attached to the remainder of the ORF1 molecule by a linker. In certain embodiments, the linker comprises one or more (e.g., at least 1, 2, 3, 4, or 5) copies of the amino acid sequence GGGGS (SEQ ID NO: 2744). In certain embodiments, the linker comprises the amino acid sequence TYTTIP (SEQ ID NO: 2745).

### N-Terminal Insertions (e.g., Structural Arginine-Rich Region Swaps)

[1764] In some embodiments, an ORF1 molecule as described herein comprises a heterologous amino acid sequence at or within 1, 2, 3, 4, 5, 6, 7, 8, 9, 10, 15, 20, 25, 30, 35, 40, or 50 amino acids of its N-terminus. In some embodiments, the structural arginine-rich region of the ORF1 molecule, or a portion thereof (e.g., consisting of at least about 5, 10, 15, 20, 25, 30, 35, or 40 contiguous amino acids, e.g., of the C-terminal portion of the structural arginine-rich region) is replaced by the heterologous amino acid sequence. In some embodiments, the heterologous amino acid sequence is from another virus (e.g., a non-Anellovirus). In certain embodiments, the heterologous amino acid sequence comprises an arginine-rich motif or arginine-rich region from the other virus, or an amino acid sequence having at least 75%, 80%, 85%, 90%, 95%, 96%, 97%, 98%, or 99% identity thereto.

[1765] In some embodiments, an N-terminal domain or portion thereof of a heterologous protein (e.g., a capsid protein from a virus other than an Anellovirus, e.g., as described herein), or a sequence having at least 80%, 85%, 90%, 95%, 96%, 97%, 98%, or 99% identity thereto, is inserted into the sequence of the ORF1 molecule (e.g., at the N-terminus and/or at the position of a deletion or truncation of the structural arginine-rich region). In some embodiments, an arginine-rich region or arginine-rich motif, or a portion thereof, of a heterologous protein, or a sequence having at least 80%, 85%, 90%, 95%, 96%, 97%, 98%, or 99% identity thereto, is inserted into the sequence of the ORF1 molecule (e.g., at the N-terminus and/or at the position of a deletion or truncation of the structural arginine-rich region). In some embodiments, the heterologous protein is a capsid protein (e.g., an ORF1 protein) from a different Anellovirus. In certain embodiments the ORF1 molecule comprises a structural arginine-rich region, or a portion thereof, from a different Anellovirus (e.g., replacing one or more of the corresponding residues of the structural arginine-rich region of the ORF1 molecule itself).

[1766] In other embodiments, the heterologous protein is a capsid protein from a virus other than an Anellovirus, e.g., as described herein. In certain embodiments, the virus is a beak and feather disease virus (BFDV). In certain embodiments, the ORF1 molecule comprises (e.g., at the N-terminus) the amino acid sequence MWGTSNCACAKFQIRRRYARPYRRRHIRRYRRRRRHFRRRRFTTNR (SEQ ID NO: 2617), or an amino acid sequence having at least 75%, 80%, 85%, 90%, 95%, 96%, 97%, 98%, or 99% identity thereto.

### P1/P2 Domain Swaps

[1767] An ORF1 molecule as described herein may, in some instances, comprise a P1 domain, or a functional variant thereof, from the capsid protein of a different virus (e.g., a different Anellovirus or a non-Anellovirus), or an amino acid sequence having at least 75%, 80%, 85%, 90%, 95%, 96%, 97%, 98%, or 99% identity thereto. In certain embodiments, the P1 domain is noncontiguous (e.g., comprising a P1-1 domain and a P1-2 domain, e.g., as described herein). In certain embodiments, the P1 domain or functional fragment thereof from the other virus replaces one or more of the corresponding residues of the P1 domain of the ORF1 molecule. In some instances, an ORF1 molecule as described herein may comprise a P2 domain, or a functional fragment thereof, from the capsid protein of a different virus (e.g., a different Anellovirus or a non-Anellovirus), or an amino acid sequence having at least 75%, 80%, 85%, 90%, 95%, 96%, 97%, 98%, or 99% identity thereto. In certain embodiments, the P2 domain or functional fragment thereof from the other virus replaces one or more of the corresponding residues of the P2 domain of the ORF1 molecule.

[1768] In some embodiments, an ORF1 molecule comprises a P1 domain, or a functional fragment thereof, from a hepatitive E virus (HEV) capsid protein, or an amino acid sequence having at least 75%, 80%, 85%, 90%, 95%, 96%, 97%, 98%, or 99% identity thereto. In some embodiments, an ORF1 molecule comprises a P2 domain, or a functional fragment thereof, from an HEV capsid protein, or an amino acid sequence having at least 75%, 80%, 85%, 90%, 95%, 96%, 97%, 98%, or 99% identity thereto.

### Other Domain Mutants

[1769] An ORF1 molecule as described herein may comprise one more additional mutations relative to a wild-type ORF1 protein sequence.

[1770] In some embodiments, a structural jelly-roll region or portion thereof of a heterologous protein (e.g., a capsid protein from a virus other than an Anellovirus, e.g., as described herein), or a sequence having at least 80%, 85%, 90%, 95%, 96%, 97%, 98%, or 99% identity thereto, is inserted into the sequence of the ORF1 molecule (e.g., at the position of a deletion or truncation of the structural jelly-roll region of the ORF1 molecule). In some embodiments, the structural jelly-roll region of an ORF1 molecule comprises one or more mutations (e.g., at least 2, 3, 4, 5, 6, 7, 8, 9, or 10 mutations) in a beta strand relative to the amino acid sequence of a wild-type Anellovirus ORF1 structural jelly-roll region.

[1771] In some embodiments, an C-terminal domain or portion thereof of a heterologous protein (e.g., a capsid protein from a virus other than an Anellovirus, e.g., as described herein), or a sequence having at least 80%, 85%, 90%, 95%, 96%, 97%, 98%, or 99% identity thereto, is inserted into the sequence of the ORF1 molecule (e.g., at the C-terminus and/or at the position of a deletion or truncation of the structural CTD).

### ORF2 Molecules

[1772] In some embodiments, the anellovector or anelloVLP comprises an ORF2 molecule and/or a nucleic acid encoding an ORF2 molecule. Generally, an ORF2 molecule comprises a polypeptide having the structural features and/or activity of an Anellovirus ORF2 protein (e.g., an Anellovirus ORF2 protein as described herein, e.g., as listed in Table A1-A32), or a functional fragment thereof. In some embodiments, an ORF2 molecule comprises an amino acid sequence having at least 70%, 75%, 80%, 85%, 90%, 95%, 96%, 97%, 98%, 99%, or 100% sequence identity to an Anellovirus ORF2 protein sequence as shown in Table A1-A32. In some embodiments, an ORF2 molecule is encoded by an ORF2 nucleic acid. In some embodiments, the ORF2 nucleic acid comprises an antisense strand, which can be directly transcribed to produce mRNA encoding the ORF2 molecule. In some embodiments, the ORF2 nucleic acid comprises a sense strand.

[1773] In some embodiments, an ORF2 molecule comprises an amino acid sequence having at least 75%, 80%, 85%, 90%, 95%, 96%, 97%, 98%, or 99% sequence identity to an Alphatorquevirus, Betatorquevirus, or Gammatorquevirus ORF2 protein. In some embodiments, an ORF2 molecule (e.g., an ORF2 molecule having at least 75%, 80%, 85%, 90%, 95%, 96%, 97%, 98%, or 99% sequence identity to an Alphatorquevirus ORF2 protein) has a length of 250 or fewer amino acids (e.g., about 150-200 amino acids). In some embodiments, an ORF2 molecule (e.g., an ORF2 molecule having at least 75%, 80%, 85%, 90%, 95%, 96%, 97%, 98%, or 99% sequence identity to a Betatorquevirus ORF2 protein) has a length of about 50-150 amino acids. In some embodiments, an ORF2 molecule (e.g., an ORF2 molecule having at least 75%, 80%, 85%, 90%, 95%, 96%, 97%, 98%, or 99% sequence identity to a Gammatorquevirus ORF2 protein) has a length of about 100-200 amino acids (e.g., about 100-150 amino acids). In some embodiments, the ORF2 molecule comprises a helix-turn-helix motif (e.g., a helix-turn-helix motif comprising two alpha helices flanking a turn region). In some embodiments, the ORF2 molecule does not comprise the amino acid sequence of the ORF2 protein of TTV isolate TA278 or TTV isolate SANBAN. In some embodiments, an ORF2 molecule has protein phosphatase activity. In some embodiments, an ORF2 molecule comprises at least one difference (e.g., a mutation, chemical modification, or epigenetic alteration) relative to a wild-type ORF2 protein, e.g., as described herein (e.g., as shown in Table A1-A32).

### Conserved ORF2 Motif

[1774] In some embodiments, a polypeptide (e.g., an ORF2 molecule) described herein comprises the amino acid sequence [W/F]X⁷HX³CX¹ CX⁵H (SEQ ID NO: 949), wherein Xⁿ is a contiguous sequence of any n amino acids. In embodiments, X⁷ indicates a contiguous sequence of any seven amino acids. In some embodiments, X³ indicates a contiguous sequence of any three amino acids. In some embodiments, X¹ indicates any single amino acid. In some embodiments, X⁵ indicates a contiguous sequence of any five amino acids. In some embodiments, the [W/F] can be either tryptophan or phenylalanine. In some embodiments, the [W/F]X⁷HX³CX¹CX⁵H (SEQ ID NO: 949) is comprised within the structural N22 domain of an ORF2 molecule, e.g., as described herein. In some embodiments, a genetic element described herein comprises a nucleic acid sequence (e.g., a nucleic acid sequence encoding an ORF2 molecule, e.g., as described herein) encoding the amino acid sequence [W/F]X⁷HX³CX¹CX⁵H (SEQ ID NO: 949), wherein Xⁿ is a contiguous sequence of any n amino acids.

### Genetic Elements

[1775] In some embodiments, the Anelloviridae family vector (e.g., anellovector) comprises a genetic element. In some embodiments, the genetic element has one or more of the following characteristics: is substantially non-integrating with a host cell's genome, is an episomal nucleic acid, is a single stranded DNA, is circular, is about 1 to 10 kb, exists within the nucleus of the cell, can be bound by endogenous proteins, produces an effector, such as a polypeptide or nucleic acid (e.g., an RNA, iRNA, microRNA) that targets a gene, activity, or function of a host or target cell. In one embodiment, the genetic element is a substantially non-integrating DNA. In some embodiments, the genetic element comprises a packaging signal, e.g., a sequence that binds a capsid protein. In some embodiments, outside of the packaging or capsid-binding sequence, the genetic element has less than 70%, 60%, 50%, 40%, 30%, 20%, 10%, 5% sequence identity to a wild type Anellovirus nucleic acid sequence, e.g., has less than 70%, 60%, 50%, 40%, 30%, 20%, 10%, 5% sequence identity to an Anellovirus nucleic acid sequence, e.g., as described herein. In some embodiments, outside of the packaging or capsid-binding sequence, the genetic element has less than 500, 450, 400, 350, 300, 250, 200, 150, or 100 contiguous nucleotides that are at least 70%, 75%, 80%, 8%, 90%, 95%, 96%, 97%, 98%, 99%, or 100% identical to an Anellovirus nucleic acid sequence. In certain embodiments, the genetic element is a circular, single stranded DNA that comprises a promoter sequence, a sequence encoding a therapeutic effector, and a capsid binding protein.

[1776] In some embodiments, the genetic element has at least about 70%, 75%, 80%, 8%, 90%, 95%, 96%, 97%, 98%, 99%, or 100% sequence identity to an Anellovirus nucleic acid sequence, e.g., as described herein (e.g., as described in any of Tables N1-N32), or a fragment thereof, or encodes an amino acid sequence having at least about 70%, 75%, 80%, 8%, 90%, 95%, 96%, 97%, 98%, 99%, or 100% sequence identity to an Anellovirus amino acid sequence (e.g., as described in any of Tables A1-A32), or a fragment thereof. In some embodiments, the genetic element comprises a sequence encoding an effector (e.g., an endogenous effector or an exogenous effector, e.g., a payload), e.g., a polypeptide effector (e.g., a protein) or nucleic acid effector (e.g., a non-coding RNA, e.g., a miRNA, siRNA, mRNA, lncRNA, RNA, DNA, an antisense RNA, gRNA).

[1777] In some embodiments, the genetic element has a length less than 20 kb (e.g., less than about 19 kb, 18 kb, 17 kb, 16 kb, 15 kb, 14 kb, 13 kb, 12 kb, 11 kb, 10 kb, 9 kb, 8 kb, 7 kb, 6 kb, 5 kb, 4 kb, 3 kb, 2 kb, 1 kb, or less). In some embodiments, the genetic element has, independently or in addition to, a length greater than 1000b (e.g., at least about 1.1 kb, 1.2 kb, 1.3 kb, 1.4 kb, 1.5 kb, 1.6 kb, 1.7 kb, 1.8 kb, 1.9 kb, 2 kb, 2.1 kb, 2.2 kb, 2.3 kb, 2.4 kb, 2.5 kb, 2.6 kb, 2.7 kb, 2.8 kb, 2.9 kb, 3 kb, 3.1 kb, 3.2 kb, 3.3 kb, 3.4 kb, 3.5 kb, 3.6 kb, 3.7 kb, 3.8 kb, 3.9 kb, 4 kb, 4.1 kb, 4.2 kb, 4.3 kb, 4.4 kb, 4.5 kb, 4.6 kb, 4.7 kb, 4.8 kb, 4.9 kb, 5 kb, or greater). In some embodiments, the genetic element has a length of about 2.5-4.6, 2.8-4.0, 3.0-3.8, or 3.2-3.7 kb. In some embodiments, the genetic element has a length of about 1.5-2.0, 1.5-2.5, 1.5-3.0, 1.5-3.5, 1.5-3.8, 1.5-3.9, 1.5-4.0, 1.5-4.5, or 1.5-5.0 kb. In some embodiments, the genetic element has a length of about 2.0-2.5, 2.0-3.0, 2.0-3.5, 2.0-3.8, 2.0-3.9, 2.0-4.0, 2.0-4.5, or 2.0-5.0 kb. In some embodiments, the genetic element has a length of about 2.5-3.0, 2.5-3.5, 2.5-3.8, 2.5-3.9, 2.5-4.0, 2.5-4.5, or 2.5-5.0 kb. In some embodiments, the genetic element has a length of about 3.0-5.0, 3.5-5.0, 4.0-5.0, or 4.5-5.0 kb. In some embodiments, the genetic element has a length of about 1.5-2.0, 2.0-2.5, 2.5-3.0, 3.0-3.5, 3.1-3.6, 3.2-3.7, 3.3-3.8, 3.4-3.9, 3.5-4.0, 4.0-4.5, or 4.5-5.0 kb.

[1778] In some embodiments, the genetic element comprises one or more of the features described herein, e.g., a sequence encoding a substantially non-pathogenic protein, a protein binding sequence, one or more sequences encoding a regulatory nucleic acid, one or more regulatory sequences, one or more sequences encoding a replication protein, and other sequences. In some embodiments, the substantially non-pathogenic protein comprises an amino acid sequence or a functional fragment thereof or a sequence having at least about 60%, 65%, 70%, 75%, 80%, 85%, 90% 95%, 96%, 97%, 98%, 99%, or 100% sequence identity to any one of the amino acid sequences described herein, an Anellovirus amino acid sequence, e.g., as listed in any of Tables A1-A32.

[1779] In some embodiments, the genetic element was produced from a double-stranded circular DNA (e.g., produced by in vitro circularization). In some embodiments, the genetic element was produced by rolling circle replication from the double-stranded circular DNA. In some embodiments, the rolling circle replication occurs in a cell (e.g., a host cell, e.g., a mammalian cell, e.g., a human cell, e.g., a HEK293T cell, an A549 cell, or a Jurkat cell). In some embodiments, the genetic element can be amplified exponentially by rolling circle replication in the cell. In some embodiments, the genetic element can be amplified linearly by rolling circle replication in the cell. In some embodiments, the double-stranded circular DNA or genetic element is capable of yielding at least 2, 4, 8, 16, 32, 64, 128, 256, 518, 1024 or more times the original quantity by rolling circle replication in the cell. In some embodiments, the double-stranded circular DNA was introduced into the cell, e.g., as described herein.

[1780] In some embodiments, the double-stranded circular DNA and/or the genetic element does not comprise one or more bacterial plasmid elements (e.g., a bacterial origin of replication or a selectable marker, e.g., a bacterial resistance gene). In some embodiments, the double-stranded circular DNA and/or the genetic element does not comprise a bacterial plasmid backbone.

[1781] In some embodiments, the double-stranded circular DNA and/or the genetic element does not comprise one or more mammalian plasmid elements (e.g., a mammalian origin of replication or a selectable marker, e.g., a mammalian resistance gene). In some embodiments, the double-stranded circular DNA and/or the genetic element does not comprise a mammalian plasmid backbone. In some embodiments, the double-stranded circular DNA and/or the genetic element does not comprise one or more insect plasmid elements (e.g., an insect origin of replication or a selectable marker, e.g., a insect resistance gene). In some embodiments, the double-stranded circular DNA and/or the genetic element does not comprise an insect plasmid backbone.

[1782] In one embodiment, the invention includes a genetic element comprising a nucleic acid sequence (e.g., a DNA sequence) encoding (i) a substantially non-pathogenic exterior protein, (ii) an exterior protein binding sequence that binds the genetic element to the substantially non-pathogenic exterior protein, and (iii) a regulatory nucleic acid. In such an embodiment, the genetic element may comprise one or more sequences with at least about 60%, 70% 80%, 85%, 90% 95%, 96%, 97%, 98% and 99% nucleotide sequence identity to any one of the nucleotide sequences to a native viral sequence (e.g., a native Anellovirus sequence, e.g., as described herein).

[1783] In some embodiments, a genetic element as described herein comprises a sequence (e.g., a TATA box, cap site, transcriptional start site, 5′ UTR, open reading frame (ORF), poly(A) signal, or GC-rich region sequence) as listed in any of Tables A1, A3, A5, A7, A9, A11, B1-B5, 1, 3, 5, 7, 9, 11, 13, 15, or 17 of PCT Publication No. WO2020/123816 (incorporated herein by reference in its entirety), or a sequence having at least 70% 80%, 85%, 90% 95%, 96%, 97%, 98% and 99% nucleotide sequence identity thereto.

[1784] In some embodiments, a genetic element comprises a sequence encoding an effector (e.g., an exogenous effector). In some embodiments, the effector-encoding sequence is inserted into an Anellovirus genome sequence (e.g., as described herein). In some embodiments, the effector-encoding sequence replaces a contiguous sequence (e.g., of at least 5, 10, 15, 20, 25, 30, 40, 50, 60, 70, 80, 90, 100, 200, 300, 400, 500, 600, 700, 800, 900, 1000, or more nucleotides) from the Anellovirus genome sequence. In some embodiments, the effector-encoding sequence replaces a TATA box, cap site, transcriptional start site, 5′ UTR, open reading frame (ORF), poly(A) signal, or GC-rich region sequence, or a portion thereof (e.g., a portion consisting of at least 5, 10, 15, 20, 25, 30, 40, 50, 60, 70, 80, 90, 100, 200, 300, 400, 500, 600, 700, 800, 900, 1000, or more nucleotides), e.g., as described herein, or a sequence having at least 70% 80%, 85%, 90% 95%, 96%, 97%, 98% and 99% nucleotide sequence identity thereto.

[1785] In some embodiments, the sequence of a first nucleic acid element comprised in a genetic element (e.g., a TATA box, cap site, transcriptional start site, 5′ UTR, open reading frame (ORF), poly(A) signal, or GC-rich region) overlaps with the sequence of a second nucleic acid element (e.g., a TATA box, cap site, transcriptional start site, 5′ UTR, open reading frame (ORF), poly(A) signal, or GC-rich region), e.g., by at least 5, 10, 15, 20, 25, 30, 40, 50, 60, 70, 80, 90, 100, 150, 200, 250, 300, 400, or 500 nucleotides. In some embodiments, the sequence of a first nucleic acid element comprised in a genetic element (e.g., a TATA box, cap site, transcriptional start site, 5′ UTR, open reading frame (ORF), poly(A) signal, or GC-rich region) does not overlap with the sequence of a second nucleic acid element (e.g., a TATA box, cap site, transcriptional start site, 5′ UTR, open reading frame (ORF), poly(A) signal, or GC-rich region).

### Protein Binding Sequence

[1786] A strategy employed by many viruses is that the viral capsid protein recognizes a specific protein binding sequence in its genome. For example, in viruses with unsegmented genomes, such as the L-A virus of yeast, there is a secondary structure (stem-loop) and a specific sequence at the 5′ end of the genome that are both used to bind the viral capsid protein. However, viruses with segmented genomes, such as Reoviridae, Orthomyxoviridae (influenza), Bunyaviruses and Arenaviruses, need to package each of the genomic segments. Some viruses utilize a complementarity region of the segments to aid the virus in including one of each of the genomic molecules. Other viruses have specific binding sites for each of the different segments. See for example, Curr Opin Struct Biol. 2010 February; 20(1): 114-120; and Journal of Virology (2003), 77 (24), 13036-13041.

[1787] In some embodiments, the genetic element encodes a protein binding sequence that binds to the substantially non-pathogenic protein. In some embodiments, the protein binding sequence facilitates packaging the genetic element into the proteinaceous exterior. In some embodiments, the protein binding sequence specifically binds a structural arginine-rich region of the substantially non-pathogenic protein. In some embodiments, the genetic element comprises a protein binding sequence as described in Example 8 of PCT Publication No. WO 2020/123816, incorporated by reference herein in its entirety. In some embodiments, the genetic element comprises a protein binding sequence having at least 70%, 80%, 85%, 90%, 95%, 96%, 97%, 98%, 99%, or 100% sequence identity to a 5′ UTR conserved domain or GC-rich domain of an Anellovirus sequence (e.g., as shown in any of Tables N1-N32).

[1788] In embodiments, the protein binding sequence has at least about 70%, 75%, 80%, 85%, 90%, 95%, 96%, 97%, 98%, 99%, or 100% sequence identity to the Anellovirus 5′ UTR conserved domain nucleotide sequence of any of Tables N1-N32.

### 5′ UTR Regions

[1789] In some embodiments, the genetic element (e.g., protein-binding sequence of the genetic element) comprises a nucleic acid sequence having at least about 75% (e.g., at least 75%, 80%, 85%, 90%, 95%, 96%, 97%, 98%, 99%, or 100%) identity to a nucleic acid sequence shown in Table 38 and/or FIG. 20 of PCT Publication No. WO 2020/123816. In some embodiments, the genetic element (e.g., protein-binding sequence of the genetic element) comprises a nucleic acid sequence of the Consensus 5′ UTR sequence shown in Table 38, wherein X₁, X₂, X₃, X₄, and X₅ are each independently any nucleotide, e.g., wherein X₁=G or T, X₂=C or A, X₃=G or A, X₄=T or C, and X₅=A, C, or T). In some embodiments, the genetic element (e.g., protein-binding sequence of the genetic element) comprises a nucleic acid sequence having at least about 75% (e.g., at least 75%, 80%, 85%, 90%, 95%, 96%, 97%, 98%, 99%, or 100%) identity to the Consensus 5′ UTR sequence shown in Table 38. In some embodiments, the genetic element (e.g., protein-binding sequence of the genetic element) comprises a nucleic acid sequence having at least about 75% (e.g., at least 75%, 80%, 85%, 90%, 95%, 96%, 97%, 98%, 99%, or 100%) identity to the exemplary TTV 5′ UTR sequence shown in Table 38. In some embodiments, the genetic element (e.g., protein-binding sequence of the genetic element) comprises a nucleic acid sequence having at least about 75% (e.g., at least 75%, 80%, 85%, 90%, 95%, 96%, 97%, 98%, 99%, or 100%) identity to the TTV-CT30F 5′ UTR sequence shown in Table 38. In some embodiments, the genetic element (e.g., protein-binding sequence of the genetic element) comprises a nucleic acid sequence having at least about 75% (e.g., at least 75%, 80%, 85%, 90%, 95%, 96%, 97%, 98%, 99%, or 100%) identity to the TTV-HD23a 5′ UTR sequence shown in Table 38. In some embodiments, the genetic element (e.g., protein-binding sequence of the genetic element) comprises a nucleic acid sequence having at least about 75% (e.g., at least 75%, 80%, 85%, 90%, 95%, 96%, 97%, 98%, 99%, or 100%) identity to the TTV-JA20 5′ UTR sequence shown in Table 38. In some embodiments, the genetic element (e.g., protein-binding sequence of the genetic element) comprises a nucleic acid sequence having at least about 75% (e.g., at least 75%, 80%, 85%, 90%, 95%, 96%, 97%, 98%, 99%, or 100%) identity to the TTV-TJNO2 5′ UTR sequence shown in Table 38. In some embodiments, the genetic element (e.g., protein-binding sequence of the genetic element) comprises a nucleic acid sequence having at least about 75% (e.g., at least 75%, 80%, 85%, 90%, 95%, 96%, 97%, 98%, 99%, or 100%) identity to the TTV-tth8 5′ UTR sequence shown in Table 38.

[1790] In some embodiments, the genetic element (e.g., protein-binding sequence of the genetic element) comprises a nucleic acid sequence having at least about 75% (e.g., at least 75%, 80%, 85%, 90%, 95%, 96%, 97%, 98%, 99%, or 100%) identity to the Alphatorquevirus Consensus 5′ UTR sequence shown in Table 38. In some embodiments, the genetic element (e.g., protein-binding sequence of the genetic element) comprises a nucleic acid sequence having at least about 75% (e.g., at least 75%, 80%, 85%, 90%, 95%, 96%, 97%, 98%, 99%, or 100%) identity to the Alphatorquevirus Clade 1 5′ UTR sequence shown in Table 38. In some embodiments, the genetic element (e.g., protein-binding sequence of the genetic element) comprises a nucleic acid sequence having at least about 75% (e.g., at least 75%, 80%, 85%, 90%, 95%, 96%, 97%, 98%, 99%, or 100%) identity to the Alphatorquevirus Clade 2 5′ UTR sequence shown in Table 38. In some embodiments, the genetic element (e.g., protein-binding sequence of the genetic element) comprises a nucleic acid sequence having at least about 75% (e.g., at least 75%, 80%, 85%, 90%, 95%, 96%, 97%, 98%, 99%, or 100%) identity to the Alphatorquevirus Clade 3 5′ UTR sequence shown in Table 38. In some embodiments, the genetic element (e.g., protein-binding sequence of the genetic element) comprises a nucleic acid sequence having at least about 75% (e.g., at least 75%, 80%, 85%, 90%, 95%, 96%, 97%, 98%, 99%, or 100%) identity to the Alphatorquevirus Clade 4 5′ UTR sequence shown in Table 38. In some embodiments, the genetic element (e.g., protein-binding sequence of the genetic element) comprises a nucleic acid sequence having at least about 75% (e.g., at least 75%, 80%, 85%, 90%, 95%, 96%, 97%, 98%, 99%, or 100%) identity to the Alphatorquevirus Clade 5 5′ UTR sequence shown in Table 38. In some embodiments, the genetic element (e.g., protein-binding sequence of the genetic element) comprises a nucleic acid sequence having at least about 75% (e.g., at least 75%, 80%, 85%, 90%, 95%, 96%, 97%, 98%, 99%, or 100%) identity to the Alphatorquevirus Clade 6 5′ UTR sequence shown in Table 38. In some embodiments, the genetic element (e.g., protein-binding sequence of the genetic element) comprises a nucleic acid sequence having at least about 75% (e.g., at least 75%, 80%, 85%, 90%, 95%, 96%, 97%, 98%, 99%, or 100%) identity to the Alphatorquevirus Clade 7 5′ UTR sequence shown in Table 38.

[1791] In some embodiments, the genetic element comprises a nucleic acid sequence having at least about 70%, 75%, 80%, 85%, 90%, 95%, 96%, 97%, 98%, 99%, or 100% sequence identity to the reverse complement of sequence annotated as the GC-rich domain nucleotide sequence of any of Tables N1-N32.

### 5′ UTR Conserved Domains

[1792] A genetic element may include an Anellovirus 5′ UTR conserved domain. Typically, the negative strand comprising the Anellovirus 5′ UTR conserved domain is packaged into a particle (e.g., an Anelloviridae family vector as described herein. In some embodiments, the Anellovirus 5′ UTR conserved domain is a wild-type Anellovirus 5′ UTR conserved domain. In some embodiments, the Anellovirus 5′ UTR conserved domain is an engineered Anellovirus 5′ UTR conserved domain having a nucleic acid sequence with at least one difference relative to the closest wild-type Anellovirus 5′ UTR conserved domain sequence. In some embodiments, the genetic element comprises a nucleic acid sequence having at least about 70%, 75%, 80%, 85%, 90%, 95%, 96%, 97%, 98%, 99%, or 100% sequence identity to the Anellovirus 5′ UTR conserved domain nucleotide sequence of any of Tables N1-N32 or Table 38.

TABLE 38
Exemplary 5′ UTR sequences from Anelloviruses. Note this table provides the
positive strand sequence. It is understood that embodiments described herein
referring to sequences in this table can refer to the positive or negative strand
sequence, e.g., the reverse complement of a sequence described in the table.

| Source | Sequence | SEQ ID NO: |
|---|---|---|
| Consensus | CGGGTGCCGX₁AGGTGAGTTTACACACCGX₂ | 105 |
| | AGTCAAGGGGCAATTCGGGCTCX₃GGACTGG | |
| | CCGGGCX₄X₅TGGG | |
| | X₁ = G or T | |
| | X₂ = C or A | |
| | X₃ = G or A | |
| | X₄ = T or C | |
| | X₅ = A, C, or T | |
| Exemplary TTV | CGGGTGCCGGAGGTGAGTTTACACACCGCA | 106 |
| Sequence | GTCAAGGGGCAATTCGGGCTCGGGACTGGC | |
| | CGGGCTWTGGG | |
| TTV-CT30F | CGGGTGCCGTAGGTGAGTTTACACACCGCA | 107 |
| | GTCAAGGGGCAATTCGGGCTCGGGACTGGC | |
| | CGGGCTATGGG | |
| TTV-HD23a | CGGGTGCCGGAGGTGAGTTTACACACCGCA | 108 |
| | GTCAAGGGGCAATTCGGGCTCGGGACTGGC | |
| | CGGGCCCTGGG | |
| TTV-JA20 | CGGGTGCCGGAGGTGAGTTTACACACCGCA | 109 |
| | GTCAAGGGGCAATTCGGGCTCGGGACTGGC | |
| | CGGGCTTTGGG | |
| TTV-TJN02 | CGGGTGCCGGAGGTGAGTTTACACACCGCA | 110 |
| | GTCAAGGGGCAATTCGGGCTCGGGACTGGC | |
| | CGGGCTATGGG | |
| TTV-tth8 | CGGGTGCCGGAGGTGAGTTTACACACCGAA | 111 |
| | GTCAAGGGGCAATTCGGGCTCAGGACTGGC | |
| | CGGGCTTTGGG | |
| Alphatorquevirus | CGGGTGCCGGAGGTGAGTTTACACACCGCA | 112 |
| Consensus 5′ UTR | GTCAAGGGGCAATTCGGGCTCGGGACTGGC | |
| | CGGGC | |
| | X₁X₂TGGG; wherein X₁ comprises T or C, and | |
| | wherein X₂ comprises A, C, or T. | |
| Alphatorquevirus | CGGGTGCCGTAGGTGAGTTTACACACCGCA | 113 |
| Clade 1 5′ UTR (e.g., | GTCAAGGGGCAATTCGGGCTCGGGACTGGC | |
| TTV-CT30F) | CGGGCTATGGG | |
| Alphatorquevirus | CGGGTGCCGGAGGTGAGTTTACACACCGCA | 114 |
| Clade 2 5′ UTR (e.g., | GTCAAGGGGCAATTCGGGCTCGGGACTGGC | |
| TTV-P13-1) | CGGGCCCGGG | |
| Alphatorquevirus | CGGGTGCCGGAGGTGAGTTTACACACCGAA | 115 |
| Clade 3 5′ UTR (e.g., | GTCAAGGGGCAATTCGGGCTCAGGACTGGC | |
| TTV-tth8) | CGGGCTTTGGG | |
| Alphatorquevirus | CGGGTGCCGGAGGTGAGTTTACACACCGCA | 116 |
| Clade 4 5′ UTR (e.g., | GTCAAGGGGCAATTCGGGCTCGGGAGGCCG | |
| TTV-HD20a) | GGCCATGGG | |
| Alphatorquevirus | CGGGTGCCGGAGGTGAGTTTACACACCGCA | 117 |
| Clade 5 5′ UTR (e.g., | GTCAAGGGGCAATTCGGGCTCGGGACTGGC | |
| TTV-16) | CGGGCCCCGGG | |
| Alphatorquevirus | CGGGTGCCGGAGGTGAGTTTACACACCGCA | 118 |
| Clade 6 5′ UTR (e.g., | GTCAAGGGGCAATTCGGGCTCGGGACTGGC | |
| TTV-TJN02) | CGGGCTATGGG | |
| Alphatorquevirus | CGGGTGCCGAAGGTGAGTTTACACACCGCA | 119 |
| Clade 7 5′ UTR (e.g., | GTCAAGGGGCAATTCGGGCTCGGGACTGGC | |
| TTV-HD16d) | CGGGCTATGGG | |

### Identification of 5′ UTR Sequences

[1793] In some embodiments, an Anelloviridae family virus (e.g., Anellovirus) 5′ UTR sequence can be identified within the genome of an Anelloviridae family virus (e.g., Anellovirus) (e.g., a putative Anelloviridae family virus genome identified, for example, by nucleic acid sequencing techniques, e.g., deep sequencing techniques). In some embodiments, an Anelloviridae family virus (e.g., Anellovirus) 5′ UTR sequence is identified by one or both of the following steps:

[1794] (i) Identification of circularization junction point: In some embodiments, a 5′ UTR will be positioned near a circularization junction point of a full-length, circularized Anelloviridae family virus (e.g., Anellovirus) genome. A circularization junction point can be identified, for example, by identifying overlapping regions of the sequence. In some embodiments, an overlapping region of the sequence can be trimmed from the sequence to produce a full-length Anelloviridae family virus (e.g., Anellovirus) genome sequence that has been circularized. In some embodiments, a genome sequence is circularized in this manner using software. Without wishing to be bound by theory, computationally circularizing a genome may result in the start position for the sequence being oriented in a non-biological. Landmarks within the sequence can be used to re-orient sequences in the proper direction. For example, landmark sequence may include sequences having substantial homology to one or more elements within an Anelloviridae family virus (e.g., Anellovirus) genome as described herein (e.g., one or more of a TATA box, cap site, initiator element, transcriptional start site, 5′ UTR conserved domain, ORF1, ORF1/1, ORF1/2, ORF2, ORF2/2, ORF2/3, ORF2t/3, three open-reading frame region, poly(A) signal, or GC-rich region of an Anelloviridae family virus (e.g., Anellovirus), e.g., as described herein).

[1795] (ii) Identification of 5′ UTR sequence: Once a putative Anelloviridae family virus (e.g., Anellovirus) genome sequence has been obtained, the sequence (or portions thereof, e.g., having a length between about 40-50, 50-60, 60-70, 70-80, 80-90, or 90-100 nucleotides) can be compared to one or more Anelloviridae family virus (e.g., Anellovirus) 5′ UTR sequences (e.g., as described herein) to identify sequences having substantial homology thereto. In some embodiments, a putative Anelloviridae family virus (e.g., Anellovirus) 5′ UTR region has at least 50%, 60%, 70%, 75%, 80%, 85%, 90%, 95%, 96%, 97%, 98%, 99%, or 100% sequence identity to an Anelloviridae family virus (e.g., Anellovirus) 5′ UTR sequence as described herein.

### GC-Rich Regions

[1796] A genetic element may include an Anellovirus GC-rich region. Typically, the negative strand comprising the Anellovirus GC-rich region is packaged into a particle (e.g., an Anelloviridae family vector as described herein. In some embodiments, the Anellovirus GC-rich region is a wild-type Anellovirus GC-rich region. In some embodiments, the Anellovirus GC-rich region is an engineered Anellovirus GC-rich region having a nucleic acid sequence with at least one difference relative to the closest wild-type Anellovirus GC-rich region sequence. In some embodiments, the Anellovirus GC-rich region comprises a contiguous sequence of at least 20, 25, 30, 31, 32, 33, 34, 35, 36, 37, 38, 39, or 40 consecutive nucleotides having a GC content of at least 70%, 75%, 80%, 85%, 90%, 95%, or 99%. In some embodiments, the genetic element (e.g., protein-binding sequence of the genetic element) comprises a nucleic acid sequence having at least about 70%, 75%, 80%, 85%, 90%, 95%, 96%, 97%, 98%, 99%, or 100% sequence identity to a GC-rich sequence shown inany of Tables N1-N32 or Table 39. In some embodiments, the genetic element (e.g., protein-binding sequence of the genetic element) comprises a nucleic acid sequence having at least about 75% (e.g., at least 75%, 80%, 85%, 90%, 95%, 96%, 97%, 98%, 99%, or 100%) identity to a 36-nucleotide GC-rich sequence as shown in Table 39 (e.g., 36-nucleotide consensus GC-rich region sequence 1, 36-nucleotide consensus GC-rich region sequence 2, TTV Clade 1 36-nucleotide region, TTV Clade 3 36-nucleotide region, TTV Clade 3 isolate GH1 36-nucleotide region, TTV Clade 3 sle1932 36-nucleotide region, TTV Clade 4 ctdc002 36-nucleotide region, TTV Clade 5 36-nucleotide region, TTV Clade 6 36-nucleotide region, or TTV Clade 7 36-nucleotide region). In some embodiments, the genetic element (e.g., protein-binding sequence of the genetic element) comprises a nucleic acid sequence comprising at least 10, 15, 20, 25, 30, 31, 32, 33, 34, 35, or 36 consecutive nucleotides of a 36-nucleotide GC-rich sequence as shown in Table 39 (e.g., 36-nucleotide consensus GC-rich region sequence 1, 36-nucleotide consensus GC-rich region sequence 2, TTV Clade 1 36-nucleotide region, TTV Clade 3 36-nucleotide region, TTV Clade 3 isolate GH1 36-nucleotide region, TTV Clade 3 sle1932 36-nucleotide region, TTV Clade 4 ctdc002 36-nucleotide region, TTV Clade 5 36-nucleotide region, TTV Clade 6 36-nucleotide region, or TTV Clade 7 36-nucleotide region).

[1797] In some embodiments, the genetic element (e.g., protein-binding sequence of the genetic element) comprises a nucleic acid sequence having at least about 75% (e.g., at least 75%, 80%, 85%, 90%, 95%, 96%, 97%, 98%, 99%, or 100%) identity to an Alphatorquevirus GC-rich region sequence, e.g., selected from TTV-CT30F, TTV-P13-1, TTV-tth8, TTV-HD20a, TTV-16, TTV-TJNO2, or TTV-HD16d, e.g., as listed in Table 39. In some embodiments, the genetic element (e.g., protein-binding sequence of the genetic element) comprises a nucleic acid sequence comprising at least 10, 15, 20, 25, 30, 35, 40, 45, 50, 60, 70, 80, 90, 100, 104, 105, 108, 110, 111, 115, 120, 122, 130, 140, 145, 150, 155, or 156 consecutive nucleotides of an Alphatorquevirus GC-rich region sequence, e.g., selected from TTV-CT30F, TTV-P13-1, TTV-tth8, TTV-HD20a, TTV-16, TTV-TJNO2, or TTV-HD16d, e.g., as listed in Table 39.

[1798] In some embodiments, the 36-nucleotide GC-rich sequence is selected from:

(i)
(SEQ ID NO: 160)
CGCGCTGCGCGCGCCGCCCAGTAGGGGGAGCCATGC,
(ii)
(SEQ ID NO: 164)
GCGCTX₁CGCGCGCGCGCCGGGGGGCTGCGCCCCCCC,

[1799] wherein X₁ is selected from T, G, or A;

(iii)
(SEQ ID NO: 165)
GCGCTTCGCGCGCCGCCCACTAGGGGGCGTTGCGCG;
(iv)
(SEQ ID NO: 166)
GCGCTGCGCGCGCCGCCCAGTAGGGGGCGCAATGCG;
(v)
(SEQ ID NO: 167)
GCGCTGCGCGCGCGGCCCCCGGGGGAGGCATTGCCT;
(vi)
(SEQ ID NO: 168)
GCGCTGCGCGCGCGCGCCGGGGGGGCGCCAGCGCCC;
(vii)
(SEQ ID NO: 169)
GCGCTTCGCGCGCGCGCCGGGGGGCTCCGCCCCCCC;
(viii)
(SEQ ID NO: 170)
GCGCTTCGCGCGCGCGCCGGGGGGCTGCGCCCCCCC;
(ix)
(SEQ ID NO: 171)
GCGCTACGCGCGCGCGCCGGGGGGCTGCGCCCCCCC;
or
(x)
(SEQ ID NO: 172)
GCGCTACGCGCGCGCGCCGGGGGGCTCTGCCCCCCC.

In some embodiments, the genetic element (e.g., protein-binding sequence of the genetic element) comprises the nucleic acid sequence CGCGCTGCGCGCGCCGCCCAGTAGGGGGAGCCATGC (SEQ ID NO: 160).

[1800] In some embodiments, the genetic element (e.g., protein-binding sequence of the genetic element) comprises a nucleic acid sequence of the Consensus GC-rich sequence shown in Table 39, wherein X₁, X₄, X₅, X₆, X₇, X₁₂, X₁₃, X₁₄, X₁₅, X₂₀, X₂₁, X₂₂, X₂₆, X₂₉, X₃₀, and X₃₃ are each independently any nucleotide and wherein X₂, X₃, X₈, X₉, X₁₀, X₁₁, X₁₆, X₁₇, X₁₈, X₁₉, X₂₃, X₂₄, X₂₅, X₂₇, X₂₈, X₃₁, X₃₂, and X₃₄ are each independently absent or any nucleotide. In some embodiments, one or more of (e.g., all of) X₁ through X₃₄ are each independently the nucleotide (or absent) specified in Table 39. In some embodiments, the genetic element (e.g., protein-binding sequence of the genetic element) comprises a nucleic acid sequence having at least about 75% (e.g., at least 75%, 80%, 85%, 90%, 95%, 96%, 97%, 98%, 99%, or 100%) identity to an exemplary TTV GC-rich sequence shown in Table 39 (e.g., the full sequence, Fragment 1, Fragment 2, Fragment 3, or any combination thereof, e.g., Fragments 1-3 in order). In some embodiments, the genetic element (e.g., protein-binding sequence of the genetic element) comprises a nucleic acid sequence having at least about 75% (e.g., at least 75%, 80%, 85%, 90%, 95%, 96%, 97%, 98%, 99%, or 100%) identity to a TTV-CT30F GC-rich sequence shown in Table 39 (e.g., the full sequence, Fragment 1, Fragment 2, Fragment 3, Fragment 4, Fragment 5, Fragment 6, Fragment 7, Fragment 8, or any combination thereof, e.g., Fragments 1-7 in order). In some embodiments, the genetic element (e.g., protein-binding sequence of the genetic element) comprises a nucleic acid sequence having at least about 75% (e.g., at least 75%, 80%, 85%, 90%, 95%, 96%, 97%, 98%, 99%, or 100%) identity to a TTV-HD23a GC-rich sequence shown in Table 39 (e.g., the full sequence, Fragment 1, Fragment 2, Fragment 3, Fragment 4, Fragment 5, Fragment 6, or any combination thereof, e.g., Fragments 1-6 in order). In some embodiments, the genetic element (e.g., protein-binding sequence of the genetic element) comprises a nucleic acid sequence having at least about 75% (e.g., at least 75%, 80%, 85%, 90%, 95%, 96%, 97%, 98%, 99%, or 100%) identity to a TTV-JA20 GC-rich sequence shown in Table 39 (e.g., the full sequence, Fragment 1, Fragment 2, or any combination thereof, e.g., Fragments 1 and 2 in order). In some embodiments, the genetic element (e.g., protein-binding sequence of the genetic element) comprises a nucleic acid sequence having at least about 75% (e.g., at least 75%, 80%, 85%, 90%, 95%, 96%, 97%, 98%, 99%, or 100%) identity to a TTV-TJNO2 GC-rich sequence shown in Table 39 (e.g., the full sequence, Fragment 1, Fragment 2, Fragment 3, Fragment 4, Fragment 5, Fragment 6, Fragment 7, Fragment 8, or any combination thereof, e.g., Fragments 1-8 in order). In some embodiments, the genetic element (e.g., protein-binding sequence ofthe genetic element) comprises a nucleic acid sequence having at least about 75% (e.g., at least 75%, 80%, 85%, 90%, 95%, 96%, 97%, 98%, 99%, or 100%) identity to a TTV-tth8 GC-rich sequence shown in Table 39 (e.g., the full sequence, Fragment 1, Fragment 2, Fragment 3, Fragment 4, Fragment 5, Fragment 6, Fragment 7, Fragment 8, Fragment 9, or any combination thereof, e.g., Fragments 1-6 in order). In some embodiments, the genetic element (e.g., protein-binding sequence of the genetic element) comprises a nucleic acid sequence having at least about 75% (e.g., at least 75%, 80%, 85%, 90%, 95%, 96%, 97%, 98%, 99%, or 100%) identity to Fragment 7 shown in Table 39. In some embodiments, the genetic element (e.g., protein-binding sequence of the genetic element) comprises a nucleic acid sequence having at least about 75% (e.g., at least 75%, 80%, 85%, 90%, 95%, 96%, 97%, 98%, 99%, or 100%) identity to Fragment 8 shown in Table 39. In some embodiments, the genetic element (e.g., protein-binding sequence of the genetic element) comprises a nucleic acid sequence having at least about 75% (e.g., at least 75%, 80%, 85%, 90%, 95%, 96%, 97%, 98%, 99%, or 100%) identity to Fragment 9 shown in Table 39.

TABLE 39
Exemplary GC-rich sequences from Anelloviruses. Note that this table
provides the positive strand sequence. It is understood that embodiments
described herein referring to sequences in this table can refer to the
positive or negative strand sequence, e.g., the reverse complement of a
sequence described in the table.

| | | | SEQ ID |
|---|---|---|---|
| Source | Sequence | | NO: |
| Consensus | CGGCGGX₁GGX₂GX₃X₄X₅CGCGCTX₆CGC | | 120 |
| | GCGCX7X₈X₉X₁₀CX₁₁X₁₂X₁₃X₁₄GGGGX₁₅X₁₆ | | |
| | X₁₇X₁₈X₁₉X₂₀X₂₁GCX₂₂X₂₃X₂₄X₂₅CCCCCCC | | |
| | X₂₆CGCGCATX₂₇X₂₈GCX₂₉CGGGX₃₀CCCC | | |
| | CCCCCX₃₁X₃₂X₃₃GGGGGGCTCCGX₃₄CCC | | |
| | CCCGGCCCCCC | | |
| | X₁ = G or C | | |
| | X₂ = G, C, or absent | | |
| | X₃ = C or absent | | |
| | X₄ = G or C | | |
| | X₅ = G or C | | |
| | X₆ = T, G, or A | | |
| | X₇ = G or C | | |
| | X₈ = G or absent | | |
| | X₉ = C or absent | | |
| | X₁₀ = C or absent | | |
| | X₁₁ = G, A, or absent | | |
| | X₁₂ = G or C | | |
| | X₁₃ = C or T | | |
| | X₁₄ = G or A | | |
| | X₁₅ = G or A | | |
| | X₁₆ = A, G, T, or absent | | |
| | X₁₇ = G, C, or absent | | |
| | X₁₈ = G, C, or absent | | |
| | X₁₉ = C, A, or absent | | |
| | X₂₀ = C or A | | |
| | X₂₁ = T or A | | |
| | X₂₂ = G or C | | |
| | X₂₃ = G, T, or absent | | |
| | X₂₄ = C or absent | | |
| | X₂₅ = G, C, or absent | | |
| | X₂₆ = G or C | | |
| | X₂₇ = G or absent | | |
| | X₂₈ = C or absent | | |
| | X₂₉ = G or A | | |
| | X₃₀ = G or T | | |
| | X₃₁ = C, T, or absent | | |
| | X₃₂ = G, C, A, or absent | | |
| | X₃₃ = G or C | | |
| | X₃₄ = C or absent | | |
| Exemplary TTV | Full sequence | GCCGCCGCGGCGGCGGSGGNGNSGCGC | 121 |
| Sequence | | GCTDCGCGCGCSNNNCRCCRGGGGGNN | |
| | | NNCWGCSNCNCCCCCCCCCGCGCATGC | |
| | | GCGGGKCCCCCCCCCNNCGGGGGGCTC | |
| | | CGCCCCCCGGCCCCCCCCCGTGCTAAA | |
| | | CCCACCGCGCATGCGCGACCACGCCCC | |
| | | CGCCGCC | |
| | Fragment 1 | GCCGCCGCGGCGGCGGSGGNGNSGCGC | 122 |
| | | GCTDCGCGCGCSNNNCRCCRGGGGGNN | |
| | | NNCWGCSNCNCCCCCCCCCGCGCAT | |
| | Fragment 2 | GCGCGGGKCCCCCCCCCNNCGGGGGGC | 123 |
| | | TCCG | |
| | Fragment 3 | CCCCCCGGCCCCCCCCCGTGCTAAACCC | 124 |
| | | ACCGCGCATGCGCGACCACGCCCCCGC | |
| | | CGCC | |
| TTV-CT30F | Full sequence | GCGGCGG-GGGGGCG-GCCGCG- | 125 |
| | | TTCGCGCGCCGCCCACCAGGGGGTG-- | |
| | | CTGCG-CGCCCCCCCCCGCGCAT | |
| | | GCGCGGGGCCCCCCCCC-- | |
| | | GGGGGGGCTCCGCCCCCCCGGCCCCCC | |
| | | CCCGTGCTAAACCCACCGCGCATGCGC | |
| | | GACCACGCCCCCGCCGCC | |
| | Fragment 1 | GCGGCGG | |
| | Fragment 2 | GGGGGCG | |
| | Fragment 3 | GCCGCG | |
| | Fragment 4 | TTCGCGCGCCGCCCACCAGGGGGTG | 129 |
| | Fragment 5 | CTGCG | |
| | Fragment 6 | CGCCCCCCCCCGCGCAT | 131 |
| | Fragment 7 | GCGCGGGGCCCCCCCCC | 132 |
| | Fragment 8 | GGGGGGGCTCCGCCCCCCCGGCCCCCC | 133 |
| | | CCCGTGCTAAACCCACCGCGCATGCGC | |
| | | GACCACGCCCCCGCCGCC | |
| TTV-HD23a | Full sequence | CGGCGGCGGCGGCG- | 134 |
| | | CGCGCGCTGCGCGCGCG--- | |
| | | CGCCGGGGGGGCGCCAGCG- | |
| | | CCCCCCCCCCCGCGCAT | |
| | | GCACGGGTCCCCCCCCCCACGGGGGGC | |
| | | TCCG CCCCCCGGCCCCCCCCC | |
| | Fragment 1 | CGGCGGCGGCGGCG | 135 |
| | Fragment 2 | CGCGCGCTGCGCGCGCG | 136 |
| | Fragment 3 | CGCCGGGGGGGCGCCAGCG | 137 |
| | Fragment 4 | CCCCCCCCCCCGCGCAT | 138 |
| | Fragment 5 | GCACGGGTCCCCCCCCCCACGGGGGGC | 139 |
| | | TCCG | |
| | Fragment 6 | CCCCCCGGCCCCCCCCC | 140 |
| TTV-JA20 | Full sequence | CCGTCGGCGGGGGGGCCGCGCGCTGCG | 141 |
| | | CGCGCGGCCC- | |
| | | CCGGGGGAGGCACAGCCTCCCCCCCCC | |
| | | GCGCGCATGCGCGCGGGTCCCCCCCCC | |
| | | TCCGGGGGGCTCCGCCCCCCGGCCCCC | |
| | | CCC | |
| | Fragment 1 | CCGTCGGCGGGGGGGCCGCGCGCTGCG | 142 |
| | | CGCGCGGCCC | |
| | Fragment 2 | CCGGGGGAGGCACAGCCTCCCCCCCCC | 143 |
| | | GCGCGCATGCGCGCGGGTCCCCCCCCC | |
| | | TCCGGGGGGCTCCGCCCCCCGGCCCCC | |
| | | CCC | |
| TTV-TJN02 | Full sequence | CGGCGGCGGCG- | 144 |
| | | CGCGCGCTACGCGCGCG--- | |
| | | CGCCGGGGGG----CTGCCGC- | |
| | | CCCCCCCCCGCGCAT | |
| | | GCGCGGGGCCCCCCCCC- | |
| | | GCGGGGGGCTCCG | |
| | | CCCCCCGGCCCCCC | |
| | Fragment 1 | CGGCGGCGGCG | 145 |
| | Fragment 2 | CGCGCGCTACGCGCGCG | 146 |
| | Fragment 3 | CGCCGGGGGG | 147 |
| | Fragment 4 | CTGCCGC | |
| | Fragment 5 | CCCCCCCCCGCGCAT | 149 |
| | Fragment 6 | GCGCGGGGCCCCCCCCC | 150 |
| | Fragment 7 | GCGGGGGGCTCCG | 151 |
| | Fragment 8 | CCCCCCGGCCCCCC | 152 |
| TTV-tth8 | Full sequence | GCCGCCGCGGCGGCGGGGG- | 153 |
| | | GCGGCGCGCTGCGCGCGCCGCCCAGTA | |
| | | GGGGGAGCCATGCG--- | |
| | | CCCCCCCCCGCGCAT | |
| | | GCGCGGGGCCCCCCCCC- | |
| | | GCGGGGGGCTCCG | |
| | | CCCCCCGGCCCCCCCCG | |
| | Fragment 1 | GCCGCCGCGGCGGCGGGGG | 154 |
| | Fragment 2 | GCGGCGCGCTGCGCGCGCCGCCCAGTA | 155 |
| | | GGGGGAGCCATGCG | |
| | Fragment 3 | CCCCCCCCCGCGCAT | 156 |
| | Fragment 4 | GCGCGGGGCCCCCCCCC | 157 |
| | Fragment 5 | GCGGGGGGCTCCG | 158 |
| | Fragment 6 | CCCCCCGGCCCCCCCCG | 159 |
| | Fragment 7 | CGCGCTGCGCGCGCCGCCCAGTAGGGG | 160 |
| | | GAGCCATGC | |
| | Fragment 8 | CCGCCATCTTAAGTAGTTGAGGCGGAC | 161 |
| | | GGTGGCGTGAGTTCAAAGGTCACCATC | |
| | | AGCCACACCTACTCAAAATGGTGG | |
| | Fragment 9 | CTTAAGTAGTTGAGGCGGACGGTGGCG | 162 |
| | | TGAGTTCAAAGGTCACCATCAGCCACA | |
| | | CCTACTCAAAATGGTGGACAATTTCTTC | |
| | | CGGGTCAAAGGTTACAGCCGCCATGTT | |
| | | AAAACACGTGACGTATGACGTCACGGC | |
| | | CGCCATTTTGTGACACAAGATGGCCGA | |
| | | CTTCCTTCC | |
| Additional GC- | 36-nucleotide | CGCGCTGCGCGCGCCGCCCAGTAGGGG | 163 |
| rich Sequences (as | consensus GC- | GAGCCATGC | |
| shown in FIG. 32 | rich region | | |
| of PCT Publication | sequence 1 | | |
| No. WO | 36-nucleotide | GCGCTX₁CGCGCGCGCGCCGGGGGGCT | 164 |
| 2020/123816) | region | GCGCCCCCCC, wherein X₁ is selected | |
| | consensus | from T, G, or A | |
| | sequence 2 | | |
| | TTV Clade 1 | GCGCTTCGCGCGCCGCCCACTAGGGGG | 165 |
| | 36-nucleotide | CGTTGCGCG | |
| | region | | |
| | TTV Clade 3 | GCGCTGCGCGCGCCGCCCAGTAGGGGG | 166 |
| | 36-nucleotide | CGCAATGCG | |
| | region | | |
| | TTV Clade 3 | GCGCTGCGCGCGCGGCCCCCGGGGGAG | 167 |
| | isolate GH1 | GCATTGCCT | |
| | 36-nucleotide | | |
| | region | | |
| | TTV Clade 3 | GCGCTGCGCGCGCGCGCCGGGGGGGCG | 168 |
| | sle 1932 36- | CCAGCGCCC | |
| | nucleotide | | |
| | region | | |
| | TTV Clade 4 | GCGCTTCGCGCGCGCGCCGGGGGGCTC | 169 |
| | ctdc002 36- | CGCCCCCCC | |
| | nucleotide | | |
| | region | | |
| | TTV Clade 5 | GCGCTTCGCGCGCGCGCCGGGGGGCTG | 170 |
| | 36-nucleotide | CGCCCCCCC | |
| | region | | |
| | TTV Clade 6 | GCGCTACGCGCGCGCGCCGGGGGGCTG | 171 |
| | 36-nucleotide | CGCCCCCCC | |
| | region | | |
| | TTV Clade 7 | GCGCTACGCGCGCGCGCCGGGGGGCTC | 172 |
| | 36-nucleotide | TGCCCCCCC | |
| | region | | |
| Additional | TTV-CT30F | GCGGCGGGGGGGCGGCCGCGTTCGCGC | 801 |
| Alphatorquevirus | | GCCGCCCACCAGGGGGTGCTGCGCGCC | |
| GC-rich region | | CCCCCCCGCGCATGCGCGGGGCCCCCC | |
| sequences | | CCCGGGGGGGCTCCGCCCCCCCGGCCC | |
| | | CCCCCCGTGCTAAACCCACCGCGCATG | |
| | | CGCGACCACGCCCCCGCCGCC | |
| | TTV-P13-1 | CCGAGCGTTAGCGAGGAGTGCGACCCT | 802 |
| | | ACCCCCTGGGCCCACTTCTTCGGAGCCG | |
| | | CGCGCTACGCCTTCGGCTGCGCGCGGC | |
| | | ACCTCAGACCCCCGCTCGTGCTGACAC | |
| | | GCTTGCGCGTGTCAGACCACTTCGGGCT | |
| | | CGCGGGGGTCGGG | |
| | TTV-tth8 | GCCGCCGCGGCGGCGGGGGGCGGCGCG | 803 |
| | | CTGCGCGCGCCGCCCAGTAGGGGGAGC | |
| | | CATGCGCCCCCCCCCGCGCATGCGCGG | |
| | | GGCCCCCCCCCGCGGGGGGCTCCGCCC | |
| | | CCCGGCCCCCCCCG | |
| | TTV-HD20a | CGGCCCAGCGGCGGCGCGCGCGCTTCG | 804 |
| | | CGCGCGCGCCGGGGGGCTCCGCCCCCC | |
| | | CCCGCGCATGCGCGGGGCCCCCCCCCG | |
| | | CGGGGGGCTCCGCCCCCCGGTCCCCCC | |
| | | CCG | |
| | TTV-16 | CGGCCGTGCGGCGGCGCGCGCGCTTCG | 805 |
| | | CGCGCGCGCCGGGGGCTGCCGCCCCCC | |
| | | CCCGCGCATGCGCGCGGGGCCCCCCCC | |
| | | CGCGGGGGGCTCCGCCCCCCGGCCCCC | |
| | | CCCCCCG | |
| | TTV-TJN02 | CGGCGGCGGCGCGCGCGCTACGCGCGC | 806 |
| | | GCGCCGGGGGGCTGCCGCCCCCCCCCC | |
| | | GCGCATGCGCGGGGCCCCCCCCCGCGG | |
| | | GGGGCTCCGCCCCCCGGCCCCCC | |
| | TTV-HD16d | GGCGGCGGCGCGCGCGCTACGCGCGCG | 807 |
| | | CGCCGGGGAGCTCTGCCCCCCCCCGCG | |
| | | CATGCGCGCGGGTCCCCCCCCCGCGGG | |
| | | GGGCTCCGCCCCCCGGTCCCCCCCCCG | |

[1801] In some embodiments, the genetic element comprises a nucleic acid sequence having at least about 70%, 75%, 80%, 85%, 90%, 95%, 96%, 97%, 98%, 99%, or 100% sequence identity to the Anellovirus GC-rich nucleotide sequence of any one of Tables N1-N32.

### Effectors

[1802] In some embodiments, the genetic element may include one or more sequences that encode a functional effector, e.g., an endogenous effector or an exogenous effector, e.g., a therapeutic polypeptide or nucleic acid, e.g., cytotoxic or cytolytic RNA or protein. In some embodiments, the functional nucleic acid is a non-coding RNA. In some embodiments, the functional nucleic acid is a coding RNA. The effector may modulate a biological activity, for example increasing or decreasing enzymatic activity, gene expression, cell signaling, and cellular or organ function. Effector activities may also include binding regulatory proteins to modulate activity of the regulator, such as transcription or translation. Effector activities also may include activator or inhibitor functions. For example, the effector may induce enzymatic activity by triggering increased substrate affinity in an enzyme, e.g., fructose 2,6-bisphosphate activates phosphofructokinase 1 and increases the rate of glycolysis in response to the insulin. In another example, the effector may inhibit substrate binding to a receptor and inhibit its activation, e.g., naltrexone and naloxone bind opioid receptors without activating them and block the receptors' ability to bind opioids. Effector activities may also include modulating protein stability/degradation and/or transcript stability/degradation. For example, proteins may be targeted for degradation by the polypeptide co-factor, ubiquitin, onto proteins to mark them for degradation. In another example, the effector inhibits enzymatic activity by blocking the enzyme's active site, e.g., methotrexate is a structural analog of tetrahydrofolate, a coenzyme for the enzyme dihydrofolate reductase that binds to dihydrofolate reductase 1000-fold more tightly than the natural substrate and inhibits nucleotide base synthesis.

[1803] In some embodiments, the sequence encoding an effector is part of the genetic element, e.g., it can be inserted at an insert site as described in Example 10, 12, or 22 of PCT Publication No. WO 2020/123816, incorporated by reference herein in its entirety. In some embodiments, the sequence encoding an effector is inserted into the genetic element at a noncoding region, e.g., a noncoding region disposed 3′ of the open reading frames and 5′ of the GC-rich region of the genetic element, in the 5′ noncoding region upstream of the TATA box, in the 5′ UTR, in the 3′ noncoding region downstream of the poly-A signal, or upstream of the GC-rich region. In some embodiments, the sequence encoding an effector is inserted into the genetic element at about nucleotide 3588 of a TTV-tth8 plasmid, e.g., as described herein or at about nucleotide 2843 of a TTMV-LY2 plasmid, e.g., as described herein. In some embodiments, the sequence encoding an effector is inserted into the genetic element at or within nucleotides 336-3015 of a TTV-tth8 plasmid, e.g., as described herein, or at or within nucleotides 242-2812 of a TTV-LY2 plasmid, e.g., as described herein. In some embodiments, the sequence encoding an effector replaces part or all of an open reading frame (e.g., an ORF as described herein, e.g., an ORF1, ORF1/1, ORF1/2, ORF2, ORF2/2, ORF2/3, and/or ORF2t/3 as shown in any one of Tables A1-A32 or N1-N32).

[1804] In some embodiments, the sequence encoding an effector comprises 100-2000, 100-1000, 100-500, 100-200, 200-2000, 200-1000, 200-500, 500-1000, 500-2000, or 1000-2000 nucleotides. In some embodiments, the effector is a nucleic acid or protein payload.

### Regulatory Nucleic Acid

[1805] In some embodiments, the effector is a regulatory nucleic acid. Regulatory nucleic acids modify expression of an endogenous gene and/or an exogenous gene. In one embodiment, the regulatory nucleic acid targets a host gene. The regulatory nucleic acids may include, but are not limited to, a nucleic acid that hybridizes to an endogenous gene (e.g., miRNA, siRNA, mRNA, lncRNA, RNA, DNA, an antisense RNA, gRNA as described herein elsewhere), nucleic acid that hybridizes to an exogenous nucleic acid such as a viral DNA or RNA, nucleic acid that hybridizes to an RNA, nucleic acid that interferes with gene transcription, nucleic acid that interferes with RNA translation, nucleic acid that stabilizes RNA or destabilizes RNA such as through targeting for degradation, and nucleic acid that modulates a DNA or RNA binding factor. In some embodiments, the regulatory nucleic acid encodes an miRNA.

[1806] In some embodiments, the regulatory nucleic acid comprises RNA or RNA-like structures typically containing 5-500 base pairs (depending on the specific RNA structure, e.g., miRNA 5-30 bps, lncRNA 200-500 bps) and may have a nucleobase sequence identical (or complementary) or nearly identical (or substantially complementary) to a coding sequence in an expressed target gene within the cell, or a sequence encoding an expressed target gene within the cell.

[1807] In some embodiments, the regulatory nucleic acid comprises a nucleic acid sequence, e.g., a guide RNA (gRNA). In some embodiments, the DNA targeting moiety comprises a guide RNA or nucleic acid encoding the guide RNA. A gRNA short synthetic RNA can be composed of a “scaffold” sequence necessary for binding to the incomplete effector moiety and a user-defined ˜20 nucleotide targeting sequence for a genomic target. In practice, guide RNA sequences are generally designed to have a length of between 17-24 nucleotides (e.g., 19, 20, or 21 nucleotides) and complementary to the targeted nucleic acid sequence. Custom gRNA generators and algorithms are available commercially for use in the design of effective guide RNAs. Gene editing has also been achieved using a chimeric “single guide RNA” (“sgRNA”), an engineered (synthetic) single RNA molecule that mimics a naturally occurring crRNA-tracrRNA complex and contains both a tracrRNA (for binding the nuclease) and at least one crRNA (to guide the nuclease to the sequence targeted for editing). Chemically modified sgRNAs have also been demonstrated to be effective in genome editing; see, for example, Hendel et al. (2015) Nature Biotechnol., 985-991.

[1808] The regulatory nucleic acid comprises a gRNA that recognizes specific DNA sequences (e.g., sequences adjacent to or within a promoter, enhancer, silencer, or repressor of a gene).

[1809] Certain regulatory nucleic acids can inhibit gene expression through the biological process of RNA interference (RNAi). RNAi molecules comprise RNA or RNA-like structures typically containing 15-50 base pairs (such as about 18-25 base pairs) and having a nucleobase sequence identical (complementary) or nearly identical (substantially complementary) to a coding sequence in an expressed target gene within the cell. RNAi molecules include, but are not limited to: short interfering RNAs (siRNAs), double-strand RNAs (dsRNA), micro RNAs (miRNAs), short hairpin RNAs (shRNA), meroduplexes, and dicer substrates (U.S. Pat. Nos. 8,084,599 8,349,809 and 8,513,207).

[1810] Long non-coding RNAs (lncRNA) are defined as non-protein coding transcripts longer than 100 nucleotides. This somewhat arbitrary limit distinguishes lncRNAs from small regulatory RNAs such as microRNAs (miRNAs), short interfering RNAs (siRNAs), and other short RNAs. In general, the majority (˜78%) of lncRNAs are characterized as tissue-specific. Divergent lncRNAs that are transcribed in the opposite direction to nearby protein-coding genes (comprise a significant proportion ˜20% of total lncRNAs in mammalian genomes) may possibly regulate the transcription of the nearby gene.

[1811] The genetic element may encode regulatory nucleic acids with a sequence substantially complementary, or fully complementary, to all or a fragment of an endogenous gene or gene product (e.g., mRNA). The regulatory nucleic acids may complement sequences at the boundary between introns and exons to prevent the maturation of newly-generated nuclear RNA transcripts of specific genes into mRNA for transcription. The regulatory nucleic acids that are complementary to specific genes can hybridize with the mRNA for that gene and prevent its translation. The antisense regulatory nucleic acid can be DNA, RNA, or a derivative or hybrid thereof.

[1812] The length of the regulatory nucleic acid that hybridizes to the transcript of interest may be between 5 to 30 nucleotides, between about 10 to 30 nucleotides, or about 11, 12, 13, 14, 15, 16, 17, 18, 19, 20, 21, 22, 23, 24, 25, 26, 27, 28, 29, 30 or more nucleotides. The degree of identity of the regulatory nucleic acid to the targeted transcript should be at least 75%, at least 80%, at least 85%, at least 90%, or at least 95%.

[1813] The genetic element may encode a regulatory nucleic acid, e.g., a micro RNA (miRNA) molecule identical to about 5 to about 25 contiguous nucleotides of a target gene. In some embodiments, the miRNA sequence targets a mRNA and commences with the dinucleotide AA, comprises a GC-content of about 30-70% (about 30-60%, about 40-60%, or about 45%-55%), and does not have a high percentage identity to any nucleotide sequence other than the target in the genome of the mammal in which it is to be introduced, for example as determined by standard BLAST search.

[1814] In some embodiments, the regulatory nucleic acid is at least one miRNA, e.g., 2, 3, 4, 5, 6, or more. In some embodiments, the genetic element comprises a sequence that encodes an miRNA at least about 75%, 80%, 85%, 90% 95%, 96%, 97%, 98%, 99% or 100% nucleotide sequence identity to any one of the nucleotide sequences or a sequence that is complementary to a sequence described herein.

[1815] siRNAs and shRNAs resemble intermediates in the processing pathway of the endogenous microRNA (miRNA) genes (Bartel, Cell 116:281-297, 2004). In some embodiments, siRNAs can function as miRNAs and vice versa (Zeng et al., Mol Cell 9:1327-1333, 2002; Doench et al., Genes Dev 17:438-442, 2003). MicroRNAs, like siRNAs, use RISC to downregulate target genes, but unlike siRNAs, most animal miRNAs do not cleave the mRNA. Instead, miRNAs reduce protein output through translational suppression or polyA removal and mRNA degradation (Wu et al., Proc Natl Acad Sci USA 103:4034-4039, 2006). Known miRNA binding sites are within mRNA 3′ UTRs; miRNAs seem to target sites with near-perfect complementarity to nucleotides 2-8 from the miRNA's 5′ end (Rajewsky, Nat Genet 38 Suppl:S8-13, 2006; Lim et al., Nature 433:769-773, 2005). This region is known as the seed region. Because siRNAs and miRNAs are interchangeable, exogenous siRNAs downregulate mRNAs with seed complementarity to the siRNA (Birmingham et al., Nat Methods 3:199-204, 2006. Multiple target sites within a 3′ UTR give stronger downregulation (Doench et al., Genes Dev 17:438-442, 2003).

[1816] Lists of known miRNA sequences can be found in databases maintained by research organizations, such as Wellcome Trust Sanger Institute, Penn Center for Bioinformatics, Memorial Sloan Kettering Cancer Center, and European Molecule Biology Laboratory, among others. Known effective siRNA sequences and cognate binding sites are also well represented in the relevant literature. RNAi molecules are readily designed and produced by technologies known in the art. In addition, there are computational tools that increase the chance of finding effective and specific sequence motifs (Lagana et al., Methods Mol. Bio., 2015, 1269:393-412).

[1817] The regulatory nucleic acid may modulate expression of RNA encoded by a gene. Because multiple genes can share some degree of sequence homology with each other, in some embodiments, the regulatory nucleic acid can be designed to target a class of genes with sufficient sequence homology. In some embodiments, the regulatory nucleic acid can contain a sequence that has complementarity to sequences that are shared amongst different gene targets or are unique for a specific gene target. In some embodiments, the regulatory nucleic acid can be designed to target conserved regions of an RNA sequence having homology between several genes thereby targeting several genes in a gene family (e.g., different gene isoforms, splice variants, mutant genes, etc.). In some embodiments, the regulatory nucleic acid can be designed to target a sequence that is unique to a specific RNA sequence of a single gene.

[1818] In some embodiments, the genetic element may include one or more sequences that encode regulatory nucleic acids that modulate expression of one or more genes.

[1819] In one embodiment, the gRNA described elsewhere herein are used as part of a CRISPR system for gene editing. For the purposes of gene editing, the anellovector or anelloVLP may be designed to include one or multiple guide RNA sequences corresponding to a desired target DNA sequence; see, for example, Cong et al. (2013) Science, 339:819-823; Ran et al. (2013) Nature Protocols, 8:2281-2308. At least about 16 or 17 nucleotides of gRNA sequence generally allow for Cas9-mediated DNA cleavage to occur; for Cpf1 at least about 16 nucleotides of gRNA sequence is needed to achieve detectable DNA cleavage.

### Therapeutic Effectors (e.g., Peptides or Polypeptides)

[1820] In some embodiments, the genetic element comprises a therapeutic expression sequence, e.g., a sequence that encodes a therapeutic peptide or polypeptide, e.g., an intracellular peptide or intracellular polypeptide, a secreted polypeptide, or a protein replacement therapeutic, e.g., a wild-type protein or a functional fragment or variant thereof. In some embodiments, the genetic element includes a sequence encoding a protein e.g., a therapeutic protein. Some examples of therapeutic proteins may include, but are not limited to, a hormone, a cytokine, an enzyme, an antibody (e.g., one or a plurality of polypeptides encoding at least a heavy chain or a light chain), a transcription factor, a receptor (e.g., a membrane receptor), a ligand, a membrane transporter, a secreted protein, a peptide, a carrier protein, a structural protein, a nuclease, or a component thereof.

[1821] In some embodiments, the genetic element includes a sequence encoding a peptide e.g., a therapeutic peptide. The peptides may be linear or branched. The peptide has a length from about 5 to about 500 amino acids, about 15 to about 400 amino acids, about 20 to about 325 amino acids, about 25 to about 250 amino acids, about 50 to about 200 amino acids, or any range there between.

[1822] In some embodiments, the polypeptide encoded by the therapeutic expression sequence may be a functional variant or fragment thereof of any of the above, e.g., a protein having at least 80%, 85%, 90%, 95%, 967%, 98%, 99% identity to a protein sequence which disclosed in a table herein by reference to its UniProt ID.

[1823] In some embodiments, the therapeutic expression sequence may encode an antibody or antibody fragment that binds any of the above, e.g., an antibody against a protein having at least 80%, 85%, 90%, 95%, 967%, 98%, 99% identity to a protein sequence which disclosed in a table herein by reference to its UniProt ID. The term “antibody” herein is used in the broadest sense and encompasses various antibody structures, including but not limited to monoclonal antibodies, polyclonal antibodies, multispecific antibodies (e.g., bispecific antibodies), and antibody fragments so long as they exhibit the desired antigen-binding activity. An “antibody fragment” refers to a molecule that includes at least one heavy chain or light chain and binds an antigen. Examples of antibody fragments include but are not limited to Fv, Fab, Fab′, Fab′-SH, F(ab′)₂; diabodies; linear antibodies; single-chain antibody molecules (e.g. scFv); and multispecific antibodies formed from antibody fragments.

[1824] In some embodiments, an effector as described herein comprises a cytosolic polypeptide or cytosolic peptide, e.g., a wild-type protein or a functional fragment or variant thereof.

[1825] In some embodiments, the effector comprises a regulatory intracellular polypeptide, e.g., a wild-type protein or a functional fragment or variant thereof. In some embodiments, the regulatory intracellular polypeptide binds one or more molecule (e.g., protein or nucleic acid) endogenous to the target cell. In some embodiments, the regulatory intracellular polypeptide increases the level or activity of one or more molecule (e.g., protein or nucleic acid) endogenous to the target cell. In some embodiments, the regulatory intracellular polypeptide decreases the level or activity of one or more molecule (e.g., protein or nucleic acid) endogenous to the target cell.

[1826] In some embodiments, an effector as described herein comprises a secreted polypeptide effector, e.g., a wild-type protein or a functional fragment or variant thereof. Exemplary secreted therapeutics include cytokines and cytokine receptors.

[1827] Exemplary cytokines and cytokine receptors are described, e.g., in Akdis et al., “Interleukins (from IL-1 to IL-38), interferons, transforming growth factor f, and TNF-α: Receptors, functions, and roles in diseases” October 2016 Volume 138, Issue 4, Pages 984-1010.

[1828] Additional exemplary secreted therapeutics include polypeptide hormones and receptors, e.g., a wild-type protein or a functional fragment or variant thereof.

[1829] Additional exemplary secreted therapeutics include growth factors, e.g., a wild-type protein or a functional fragment or variant thereof. Exemplary growth factors and growth factor receptors are described, e.g., in Bafico et al., “Classification of Growth Factors and Their Receptors” Holland-Frei Cancer Medicine. 6th edition.

[1830] Additional exemplary secreted therapeutics include clotting-associated factors, e.g., a wild-type protein or a functional fragment or variant thereof.

[1831] In some embodiments, an effector described herein comprises a protein replacement therapeutic, e.g., a wild-type protein or a functional fragment or variant thereof. Exemplary protein replacement therapeutics are described herein.

[1832] In some embodiments, an effector described herein comprises an enzymatic effector, e.g., a wild-type protein or a functional fragment or variant thereof.

[1833] In some embodiments, an effector described herein comprises a non-enzymatic effector, e.g., a wild-type protein or a functional fragment or variant thereof.

[1834] In some embodiments, an effector described herein comprises a protein that, when mutated, causes a lysosomal storage disorder, e.g., a wild-type protein or a functional fragment or variant thereof. In some embodiments, an effector described herein comprises a transporter protein, e.g., a wild-type protein or a functional fragment or variant thereof.

[1835] In some embodiments, a functional variant of a wild-type protein comprises a protein that has one or more activities of the wild-type protein, e.g., the functional variant catalyzes the same reaction as the corresponding wild-type protein, e.g., at a rate no less than 10%, 20%, 30%, 40%, or 50% lower than the wild-type protein. In some embodiments, the functional variant binds to the same binding partner that is bound by the wild-type protein, e.g., with a Kd of no more than 10%, 20%, 30%, 40%, or 50% higher than the Kd of the corresponding wild-type protein for the same binding partner under the same conditions. In some embodiments, the functional variant has at a polyeptpide sequence at least 70%, 75%, 80%, 85%, 90%, 95%, 96%, 97%, 98%, or 99% identical to that of the wild-type polypeptide. In some embodiments, the functional variant comprises a homolog (e.g., ortholog or paralog) of the corresponding wild-type protein. In some embodiments, the functional variant is a fusion protein. In some embodiments, the fusion comprises a first region with at least 70%, 75%, 80%, 85%, 90%, 95%, 96%, 97%, 98%, or 99% identity to the corresponding wild-type protein, and a second, heterologous region. In some embodiments, the functional variant comprises or consists of a fragment of the corresponding wild-type protein.

[1836] In some embodiments, an effector as described herein comprises a transformation factor, e.g., a wild-type protein or a fragment or variant thereof. In embodiments, the transformation factor is a protein factor that transforms fibroblasts into differentiated cells. In some embodiments, an effector as described herein comprises a protein that stimulates cellular regeneration, e.g., a wild-type protein or a fragment or variant thereof.

[1837] In some embodiments, an effector as described herein modulates STING/cGAS signaling, e.g., a wild-type protein or a fragment or variant thereof. In some embodiments, the STING modulator is a polypeptide, e.g., a viral polypeptide or a functional variant thereof. For instance, the effector may comprise a STING modulator (e.g., inhibitor) described in Maringer et al. “Message in a bottle: lessons learned from antagonism of STING signalling during RNA virus infection” Cytokine & Growth Factor Reviews Volume 25, Issue 6, December 2014, Pages 669-679. Additional STING modulators (e.g., activators) are described, e.g., in Wang et al. “STING activator c-di-GMP enhances the anti-tumor effects of peptide vaccines in melanoma-bearing mice.” Cancer Immunol Immunother. 2015 August; 64(8):1057-66. doi: 10.1007/s00262-015-1713-5. Epub 2015 May 19; Bose “cGAS/STING Pathway in Cancer: Jekyll and Hyde Story of Cancer Immune Response” Int J Mol Sci. 2017 November; 18(11): 2456; and Fu et al. “STING agonist formulated cancer vaccines can cure established tumors resistant to PD-1 blockade” Sci Transl Med. 2015 Apr. 15; 7 (283): 283ra52. Some examples of peptides include, but are not limited to, fluorescent tag or marker, antigen, peptide therapeutic, synthetic or analog peptide from naturally-bioactive peptide, agonist or antagonist peptide, anti-microbial peptide, a targeting or cytotoxic peptide, a degradation or self-destruction peptide, and degradation or self-destruction peptides. Peptides useful in the invention described herein also include antigen-binding peptides, e.g., antigen binding antibody or antibody-like fragments, such as single chain antibodies, nanobodies (see, e.g., Steeland et al. 2016. Nanobodies as therapeutics: big opportunities for small antibodies. Drug Discov Today: 21(7):1076-113). Such antigen binding peptides may bind a cytosolic antigen, a nuclear antigen, or an intra-organellar antigen.

[1838] In some embodiments, the genetic element comprises a sequence that encodes small peptides, peptidomimetics (e.g., peptoids), amino acids, and amino acid analogs. Such therapeutics generally have a molecular weight less than about 5,000 grams per mole, a molecular weight less than about 2,000 grams per mole, a molecular weight less than about 1,000 grams per mole, a molecular weight less than about 500 grams per mole, and salts, esters, and other pharmaceutically acceptable forms of such compounds. Such therapeutics may include, but are not limited to, a neurotransmitter, a hormone, a drug, a toxin, a viral or microbial particle, a synthetic molecule, and agonists or antagonists thereof.

[1839] In some embodiments, the composition, anellovector, or anelloVLP described herein includes a polypeptide linked to a ligand that is capable of targeting a specific location, tissue, or cell.

### Gene Editing Components

[1840] The genetic element of the anellovector may include one or more genes that encode a component of a gene editing system. Alternatively, an anellovector or anelloVLP as described herein may comprise a component of a gene editing system. Exemplary gene editing systems include the clustered regulatory interspaced short palindromic repeat (CRISPR) system, zinc finger nucleases (ZFNs), and Transcription Activator-Like Effector-based Nucleases (TALEN). ZFNs, TALENs, and CRISPR-based methods are described, e.g., in Gaj et al. Trends Biotechnol. 31.7 (2013):397-405; CRISPR methods of gene editing are described, e.g., in Guan et al., Application of CRISPR-Cas system in gene therapy: Pre-clinical progress in animal model. DNA Repair 2016 October; 46:1-8. doi: 10.1016/j.dnarep.2016.07.004; Zheng et al., Precise gene deletion and replacement using the CRISPR/Cas9 system in human cells. BioTechniques, Vol. 57, No. 3, September 2014, pp. 115-124.

[1841] CRISPR systems are adaptive defense systems originally discovered in bacteria and archaea. CRISPR systems use RNA-guided nucleases termed CRISPR-associated or “Cas” endonucleases (e.g., Cas9 or Cpf1) to cleave foreign DNA. In a typical CRISPR/Cas system, an endonuclease is directed to a target nucleotide sequence (e.g., a site in the genome that is to be sequence-edited) by sequence-specific, non-coding “guide RNAs” that target single- or double-stranded DNA sequences. Three classes (I-III) of CRISPR systems have been identified. The class II CRISPR systems use a single Cas endonuclease (rather than multiple Cas proteins). One class II CRISPR system includes a type II Cas endonuclease such as Cas9, a CRISPR RNA (“crRNA”), and a trans-activating crRNA (“tracrRNA”). The crRNA contains a “guide RNA”, typically about 20-nucleotide RNA sequence that corresponds to a target DNA sequence. The crRNA also contains a region that binds to the tracrRNA to form a partially double-stranded structure which is cleaved by RNase III, resulting in a crRNA/tracrRNA hybrid. The crRNA/tracrRNA hybrid then directs the Cas9 endonuclease to recognize and cleave the target DNA sequence. The target DNA sequence must generally be adjacent to a “protospacer adjacent motif” (“PAM”) that is specific for a given Cas endonuclease; however, PAM sequences appear throughout a given genome.

[1842] In some embodiments, the anellovector includes a gene for a CRISPR endonuclease. For example, some CRISPR endonucleases identified from various prokaryotic species have unique PAM sequence requirements; examples of PAM sequences include 5′-NGG (Streptococcus pyogenes), 5′-NNAGAA (Streptococcus thermophilus CRISPRI), 5′-NGGNG (Streptococcus thermophilus CRISPR3), and 5′-NNNGATT (Neisseria meningiditis). Some endonucleases, e.g., Cas9 endonucleases, are associated with G-rich PAM sites, e.g., 5′-NGG, and perform blunt-end cleaving of the target DNA at a location 3 nucleotides upstream from (5′ from) the PAM site. Another class II CRISPR system includes the type V endonuclease Cpf1, which is smaller than Cas9; examples include AsCpf1 (from Acidaminococcus sp.) and LbCpf1 (from Lachnospiraceae sp.). Cpf1 endonucleases, are associated with T-rich PAM sites, e.g., 5′-TTN. Cpf1 can also recognize a 5′-CTA PAM motif. Cpf1 cleaves the target DNA by introducing an offset or staggered double-strand break with a 4- or 5-nucleotide 5′ overhang, for example, cleaving a target DNA with a 5-nucleotide offset or staggered cut located 18 nucleotides downstream from (3′ from) from the PAM site on the coding strand and 23 nucleotides downstream from the PAM site on the complimentary strand; the 5-nucleotide overhang that results from such offset cleavage allows more precise genome editing by DNA insertion by homologous recombination than by insertion at blunt-end cleaved DNA. See, e.g., Zetsche et al. (2015) Cell, 163:759-771.

[1843] A variety of CRISPR associated (Cas) genes may be included in the anellovector. Specific examples of genes are those that encode Cas proteins from class II systems including Cas1, Cas2, Cas3, Cas4, Cas5, Cas6, Cas7, Cas8, Cas9, Cas10, Cpf1, C2C1, or C2C3. In some embodiments, the anellovector includes a gene encoding a Cas protein, e.g., a Cas9 protein, may be from any of a variety of prokaryotic species. In some embodiments, the anellovector includes a gene encoding a particular Cas protein, e.g., a particular Cas9 protein, is selected to recognize a particular protospacer-adjacent motif (PAM) sequence. In some embodiments, the anellovector includes nucleic acids encoding two or more different Cas proteins, or two or more Cas proteins, may be introduced into a cell, zygote, embryo, or animal, e.g., to allow for recognition and modification of sites comprising the same, similar or different PAM motifs. In some embodiments, the anellovector includes a gene encoding a modified Cas protein with a deactivated nuclease, e.g., nuclease-deficient Cas9.

[1844] Whereas wild-type Cas9 protein generates double-strand breaks (DSBs) at specific DNA sequences targeted by a gRNA, a number of CRISPR endonucleases having modified functionalities are known, for example: a “nickase” version of Cas endonuclease (e.g., Cas9) generates only a single-strand break; a catalytically inactive Cas endonuclease, e.g., Cas9 (“dCas9”) does not cut the target DNA. A gene encoding a dCas9 can be fused with a gene encoding an effector domain to repress (CRISPRi) or activate (CRISPRa) expression of a target gene. For example, the gene may encode a Cas9 fusion with a transcriptional silencer (e.g., a KRAB domain) or a transcriptional activator (e.g., a dCas9-VP64 fusion). A gene encoding a catalytically inactive Cas9 (dCas9) fused to FokI nuclease (“dCas9-FokI”) can be included to generate DSBs at target sequences homologous to two gRNAs. See, e.g., the numerous CRISPR/Cas9 plasmids disclosed in and publicly available from the Addgene repository (Addgene, 75 Sidney St., Suite 550A, Cambridge, MA 02139; addgene.org/crispr/). A “double nickase” Cas9 that introduces two separate double-strand breaks, each directed by a separate guide RNA, is described as achieving more accurate genome editing by Ran et al. (2013) Cell, 154:1380-1389.

[1845] CRISPR technology for editing the genes of eukaryotes is disclosed in US Patent Application Publications 2016/0138008A1 and US2015/0344912A1, and in U.S. Pat. Nos. 8,697,359, 8,771,945, 8,945,839, 8,999,641, 8,993,233, 8,895,308, 8,865,406, 8,889,418, 8,871,445, 8,889,356, 8,932,814, 8,795,965, and 8,906,616. Cpf1 endonuclease and corresponding guide RNAs and PAM sites are disclosed in US Patent Application Publication 2016/0208243 A1.

[1846] In some embodiments, the anellovector comprises a gene encoding a polypeptide described herein, e.g., a targeted nuclease, e.g., a Cas9, e.g., a wild type Cas9, a nickase Cas9 (e.g., Cas9 D10A), a dead Cas9 (dCas9), eSpCas9, Cpf1, C2C1, or C2C3, and a gRNA. The choice of genes encoding the nuclease and gRNA(s) is determined by whether the targeted mutation is a deletion, substitution, or addition of nucleotides, e.g., a deletion, substitution, or addition of nucleotides to a targeted sequence. Genes that encode a catalytically inactive endonuclease e.g., a dead Cas9 (dCas9, e.g., D10A; H840A) tethered with all or a portion of (e.g., biologically active portion of) an (one or more) effector domain (e.g., VP64) create chimeric proteins that can modulate activity and/or expression of one or more target nucleic acids sequences.

[1847] In some embodiments, the anellovector includes a gene encoding a fusion of a dCas9 with all or a portion of one or more effector domains (e.g., a full-length wild-type effector domain, or a fragment or variant thereof, e.g., a biologically active portion thereof) to create a chimeric protein useful in the methods described herein. Accordingly, in some embodiments, the anellovector includes a gene encoding a dCas9-methylase fusion. In other some embodiments, the anellovector includes a gene encoding a dCas9-enzyme fusion with a site-specific gRNA to target an endogenous gene.

[1848] In other aspects, the anellovector includes a gene encoding 1, 2, 3, 4, 5, 6, 7, 8, 9, 10, 11, 12, 13, 14, 15, 16, 17, 18, 19, 20, or more effector domains (all or a biologically active portion) fused with dCas9.

### Regulatory Sequences

[1849] In some embodiments, the genetic element comprises a regulatory sequence, e.g., a promoter or an enhancer, operably linked to the sequence encoding the effector.

[1850] In some embodiments, a promoter includes a DNA sequence that is located adjacent to a DNA sequence that encodes an expression product. A promoter may be linked operatively to the adjacent DNA sequence. A promoter typically increases an amount of product expressed from the DNA sequence as compared to an amount of the expressed product when no promoter exists. A promoter from one organism can be utilized to enhance product expression from the DNA sequence that originates from another organism. For example, a vertebrate promoter may be used for the expression of jellyfish GFP in vertebrates. In addition, one promoter element can increase an amount of products expressed for multiple DNA sequences attached in tandem. Hence, one promoter element can enhance the expression of one or more products. Multiple promoter elements are well-known to persons of ordinary skill in the art.

[1851] In one embodiment, high-level constitutive expression is desired. Examples of such promoters include, without limitation, the retroviral Rous sarcoma virus (RSV) long terminal repeat (LTR) promoter/enhancer, the cytomegalovirus (CMV) immediate early promoter/enhancer (see, e.g., Boshart et a1, Cell, 41:521-530 (1985)), the SV40 promoter, the dihydrofolate reductase promoter, the cytoplasmic .beta.-actin promoter and the phosphoglycerol kinase (PGK) promoter.

[1852] In another embodiment, inducible promoters may be desired. Inducible promoters are those which are regulated by exogenously supplied compounds, either in cis or in trans, including without limitation, the zinc-inducible sheep metallothionine (MT) promoter; the dexamethasone (Dex)-inducible mouse mammary tumor virus (MMTV) promoter; the T7 polymerase promoter system (WO 98/10088); the tetracycline-repressible system (Gossen et al, Proc. Natl. Acad. Sci. USA, 89:5547-5551 (1992)); the tetracycline-inducible system (Gossen et al., Science, 268:1766-1769 (1995); see also Harvey et al., Curr. Opin. Chem. Biol., 2:512-518 (1998)); the RU486-inducible system (Wang et al., Nat. Biotech., 15:239-243 (1997) and Wang et al., Gene Ther., 4:432-441 (1997)]; and the rapamycin-inducible system (Magari et al., J. Clin. Invest., 100:2865-2872 (1997); Rivera et al., Nat. Medicine. 2:1028-1032 (1996)). Other types of inducible promoters which may be useful in this context are those which are regulated by a specific physiological state, e.g., temperature, acute phase, or in replicating cells only.

[1853] In some embodiments, a native promoter for a gene or nucleic acid sequence of interest is used. The native promoter may be used when it is desired that expression of the gene or the nucleic acid sequence should mimic the native expression. The native promoter may be used when expression of the gene or other nucleic acid sequence must be regulated temporally or developmentally, or in a tissue-specific manner, or in response to specific transcriptional stimuli. In a further embodiment, other native expression control elements, such as enhancer elements, polyadenylation sites or Kozak consensus sequences may also be used to mimic the native expression.

[1854] In some embodiments, the genetic element comprises a gene operably linked to a tissue-specific promoter. For instance, if expression in skeletal muscle is desired, a promoter active in muscle may be used. These include the promoters from genes encoding skeletal α-actin, myosin light chain 2A, dystrophin, muscle creatine kinase, as well as synthetic muscle promoters with activities higher than naturally-occurring promoters. See Li et al., Nat. Biotech., 17:241-245 (1999). Examples of promoters that are tissue-specific are known for liver albumin, Miyatake et al. J. Virol., 71:5124-32 (1997); hepatitis B virus core promoter, Sandig et al., Gene Ther. 3:1002-9 (1996); alpha-fetoprotein (AFP), Arbuthnot et al, Hum. Gene Ther., 7:1503-14 (1996)], bone (osteocalcin, Stein et al., Mol. Biol. Rep., 24:185-96 (1997); bone sialoprotein, Chen et al., J. Bone Miner. Res. 11:654-64 (1996)), lymphocytes (CD2, Hansal et al., J. Immunol., 161:1063-8 (1998); immunoglobulin heavy chain; T cell receptor a chain), neuronal (neuron-specific enolase (NSE) promoter, Andersen et al. Cell. Mol. Neurobiol., 13:503-15 (1993); neurofilament light-chain gene, Piccioli et al., Proc. Natl. Acad. Sci. USA, 88:5611-5 (1991); the neuron-specific vgf gene, Piccioli et al., Neuron, 15:373-84 (1995)]; among others.

[1855] The genetic element may include an enhancer, e.g., a DNA sequence that is located adjacent to the DNA sequence that encodes a gene. Enhancer elements are typically located upstream of a promoter element or can be located downstream of or within a coding DNA sequence (e.g., a DNA sequence transcribed or translated into a product or products). Hence, an enhancer element can be located 100 base pairs, 200 base pairs, or 300 or more base pairs upstream or downstream of a DNA sequence that encodes the product. Enhancer elements can increase an amount of recombinant product expressed from a DNA sequence above increased expression afforded by a promoter element. Multiple enhancer elements are readily available to persons of ordinary skill in the art.

[1856] In some embodiments, the genetic element comprises one or more inverted terminal repeats (ITR) flanking the sequences encoding the expression products described herein. In some embodiments, the genetic element comprises one or more long terminal repeats (LTR) flanking the sequence encoding the expression products described herein. Examples of promoter sequences that may be used, include, but are not limited to, the simian virus 40 (SV40) early promoter, mouse mammary tumor virus (MMTV), human immunodeficiency virus (HIV) long terminal repeat (LTR) promoter, MoMuLV promoter, an avian leukemia virus promoter, an Epstein-Barr virus immediate early promoter, and a Rous sarcoma virus promoter.

### Replication Proteins

[1857] In some embodiments, the genetic element of the anellovector, e.g., synthetic anellovector, may include sequences that encode one or more replication proteins. In some embodiments, the anellovector may replicate by a rolling-circle replication method, e.g., synthesis of the leading strand and the lagging strand is uncoupled. In such embodiments, the anellovector comprises three elements additional elements: i) a gene encoding an initiator protein, ii) a double strand origin, and iii) a single strand origin. A rolling circle replication (RCR) protein complex comprising replication proteins binds to the leading strand and destabilizes the replication origin. The RCR complex cleaves the genome to generate a free 3′OH extremity. Cellular DNA polymerase initiates viral DNA replication from the free 3′OH extremity. After the genome has been replicated, the RCR complex closes the loop covalently. This leads to the release of a positive circular single-stranded parental DNA molecule and a circular double-stranded DNA molecule composed of the negative parental strand and the newly synthesized positive strand. The single-stranded DNA molecule can be either encapsidated or involved in a second round of replication. See for example, Virology Journal 2009, 6:60 doi:10.1186/1743-422X-6-60.

[1858] The genetic element may comprise a sequence encoding a polymerase, e.g., RNA polymerase or a DNA polymerase.

### Other Sequences

[1859] In some embodiments, the genetic element further includes a nucleic acid encoding a product (e.g., a ribozyme, a therapeutic mRNA encoding a protein, an exogenous gene).

[1860] In some embodiments, the genetic element includes one or more sequences that affect species and/or tissue and/or cell tropism (e.g. capsid protein sequences), infectivity (e.g. capsid protein sequences), immunosuppression/activation (e.g. regulatory nucleic acids), viral genome binding and/or packaging, immune evasion (non-immunogenicity and/or tolerance), pharmacokinetics, endocytosis and/or cell attachment, nuclear entry, intracellular modulation and localization, exocytosis modulation, propagation, and nucleic acid protection of the anellovector in a host or host cell.

[1861] In some embodiments, the genetic element may comprise other sequences that include DNA, RNA, or artificial nucleic acids. The other sequences may include, but are not limited to, genomic DNA, cDNA, or sequences that encode tRNA, mRNA, rRNA, miRNA, gRNA, siRNA, or other RNAi molecules. In one embodiment, the genetic element includes a sequence encoding an siRNA to target a different loci of the same gene expression product as the regulatory nucleic acid. In one embodiment, the genetic element includes a sequence encoding an siRNA to target a different gene expression product as the regulatory nucleic acid.

[1862] In some embodiments, the genetic element further comprises one or more of the following sequences: a sequence that encodes one or more miRNAs, a sequence that encodes one or more replication proteins, a sequence that encodes an exogenous gene, a sequence that encodes a therapeutic, a regulatory sequence (e.g., a promoter, enhancer), a sequence that encodes one or more regulatory sequences that targets endogenous genes (siRNA, lncRNAs, shRNA), and a sequence that encodes a therapeutic mRNA or protein.

[1863] The other sequences may have a length from about 2 to about 5000 nts, about 10 to about 100 nts, about 50 to about 150 nts, about 100 to about 200 nts, about 150 to about 250 nts, about 200 to about 300 nts, about 250 to about 350 nts, about 300 to about 500 nts, about 10 to about 1000 nts, about 50 to about 1000 nts, about 100 to about 1000 nts, about 1000 to about 2000 nts, about 2000 to about 3000 nts, about 3000 to about 4000 nts, about 4000 to about 5000 nts, or any range therebetween.

### Encoded Genes

[1864] For example, the genetic element may include a gene associated with a signaling biochemical pathway, e.g., a signaling biochemical pathway-associated gene or polynucleotide. Examples include a disease associated gene or polynucleotide. A “disease-associated” gene or polynucleotide refers to any gene or polynucleotide which is yielding transcription or translation products at an abnormal level or in an abnormal form in cells derived from a disease-affected tissues compared with tissues or cells of a non disease control. It may be a gene that becomes expressed at an abnormally high level; it may be a gene that becomes expressed at an abnormally low level, where the altered expression correlates with the occurrence and/or progression of the disease. A disease-associated gene also refers to a gene possessing mutation(s) or genetic variation that is directly responsible or is in linkage disequilibrium with a gene(s) that is responsible for the etiology of a disease.

[1865] Examples of disease-associated genes and polynucleotides are available from McKusick-Nathans Institute of Genetic Medicine, Johns Hopkins University (Baltimore, Md.) and National Center for Biotechnology Information, National Library of Medicine (Bethesda, Md.). Examples of disease-associated genes and polynucleotides are listed in Tables A and B of U.S. Pat. No. 8,697,359, which are herein incorporated by reference in their entirety. Disease specific information is available from McKusick-Nathans Institute of Genetic Medicine, Johns Hopkins University (Baltimore, Md.) and National Center for Biotechnology Information, National Library of Medicine (Bethesda, Md.). Examples of signaling biochemical pathway-associated genes and polynucleotides are listed in Tables A-C of U.S. Pat. No. 8,697,359, which are herein incorporated by reference in their entirety.

[1866] Moreover, the genetic elements can encode targeting moieties, as described elsewhere herein. This can be achieved, e.g., by inserting a polynucleotide encoding a sugar, a glycolipid, or a protein, such as an antibody. Those skilled in the art know additional methods for generating targeting moieties.

### Viral Sequence

[1867] In some embodiments, the genetic element comprises at least one viral sequence. In some embodiments, the sequence has homology or identity to one or more sequence from a single stranded DNA virus, e.g., Anellovirus, Bidnavirus, Circovirus, Geminivirus, Genomovirus, Inovirus, Microvirus, Nanovirus, Parvovirus, and Spiravirus. In some embodiments, the sequence has homology or identity to one or more sequence from a double stranded DNA virus, e.g., Adenovirus, Ampullavirus, Ascovirus, Asfarvirus, Baculovirus, Fusellovirus, Globulovirus, Guttavirus, Hytrosavirus, Herpesvirus, Iridovirus, Lipothrixvirus, Nimavirus, and Poxvirus. In some embodiments, the sequence has homology or identity to one or more sequence from an RNA virus, e.g., Alphavirus, Furovirus, Hepatitis virus, Hordeivirus, Tobamovirus, Tobravirus, Tricornavirus, Rubivirus, Birnavirus, Cystovirus, Partitivirus, and Reovirus.

[1868] In some embodiments, the genetic element may comprise one or more sequences from a non-pathogenic virus, e.g., a symbiotic virus, e.g., a commensal virus, e.g., a native virus, e.g., an Anellovirus. Recent changes in nomenclature have classified the three Anelloviruses able to infect human cells into Alphatorquevirus (TT), Betatorquevirus (TTM), and Gammatorquevirus (TTMD) Genera of the Anelloviridae family of viruses. To date Anelloviruses have not been linked to any human disease. In some embodiments, the genetic element may comprise a sequence with homology or identity to a Torque Teno Virus (TT), a non-enveloped, single-stranded DNA virus with a circular, negative-sense genome. In some embodiments, the genetic element may comprise a sequence with homology or identity to a SEN virus, a Sentinel virus, a TTV-like mini virus, and a TT virus. Different types of TT viruses have been described including TT virus genotype 6, TT virus group, TTV-like virus DXL1, and TTV-like virus DXL2. In some embodiments, the genetic element may comprise a sequence with homology or identity to a smaller virus, Torque Teno-like Mini Virus (TTM), or a third virus with a genomic size in between that of TTV and TTMV, named Torque Teno-like Midi Virus (TTMD). In some embodiments, the genetic element may comprise one or more sequences or a fragment of a sequence from a non-pathogenic virus having at least about 60%, 70% 80%, 85%, 90% 95%, 96%, 97%, 98% and 99% nucleotide sequence identity to any one of the nucleotide sequences described herein.

[1869] In some embodiments, the genetic element comprises one or more sequences with homology or identity to one or more sequences from one or more non-Anelloviruses, e.g., adenovirus, herpes virus, pox virus, vaccinia virus, SV40, papilloma virus, an RNA virus such as a retrovirus, e.g., lentivirus, a single-stranded RNA virus, e.g., hepatitis virus, or a double-stranded RNA virus e.g., rotavirus. Since, in some embodiments, recombinant retroviruses are defective, assistance may be provided order to produce infectious particles. Such assistance can be provided, e.g., by using helper cell lines that contain plasmids encoding all of the structural genes of the retrovirus under the control of regulatory sequences within the LTR. Suitable cell lines for replicating the anellovectors described herein include cell lines known in the art, e.g., A549 cells, which can be modified as described herein. Said genetic element can additionally contain a gene encoding a selectable marker so that the desired genetic elements can be identified.

[1870] In some embodiments, the genetic element includes non-silent mutations, e.g., base substitutions, deletions, or additions resulting in amino acid differences in the encoded polypeptide, so long as the sequence remains at least about 70%, 75%, 80%, 85%, 90%, 95%, 96%, 97%, 98%, or 99% identical to the polypeptide encoded by the first nucleotide sequence or otherwise is useful for practicing the present invention. In this regard, certain conservative amino acid substitutions may be made which are generally recognized not to inactivate overall protein function: such as in regard of positively charged amino acids (and vice versa), lysine, arginine and histidine; in regard of negatively charged amino acids (and vice versa), aspartic acid and glutamic acid; and in regard of certain groups of neutrally charged amino acids (and in all cases, also vice versa), (1) alanine and serine, (2) asparagine, glutamine, and histidine, (3) cysteine and serine, (4) glycine and proline, (5) isoleucine, leucine and valine, (6) methionine, leucine and isoleucine, (7) phenylalanine, methionine, leucine, and tyrosine, (8) serine and threonine, (9) tryptophan and tyrosine, (10) and for example tyrosine, tryptophan and phenylalanine. Amino acids can be classified according to physical properties and contribution to secondary and tertiary protein structure. A conservative substitution is recognized in the art as a substitution of one amino acid for another amino acid that has similar properties.

[1871] Identity of two or more nucleic acid or polypeptide sequences having the same or a specified percentage of nucleotides or amino acid residues that are the same (e.g., about 60%, 65%, 70%, 75%, 80%, 85%, 90%, 91%, 92%, 93%, 94%, 95%, 96%, 97%, 98%, 99%, or higher identity over a specified region, when compared and aligned for maximum correspondence over a comparison window or designated region) may be measured using a BLAST or BLAST 2.0 sequence comparison algorithms with default parameters described below, or by manual alignment and visual inspection (see, e.g., NCBI web site www.ncbi.nlm.nih.gov/BLAST/or the like). Identity may also refer to, or may be applied to, the compliment of a test sequence. Identity also includes sequences that have deletions and/or additions, as well as those that have substitutions. As described herein, the algorithms account for gaps and the like. Identity may exist over a region that is at least about 10 amino acids or nucleotides in length, about 15 amino acids or nucleotides in length, about 20 amino acids or nucleotides in length, about 25 amino acids or nucleotides in length, about 30 amino acids or nucleotides in length, about 35 amino acids or nucleotides in length, about 40 amino acids or nucleotides in length, about 45 amino acids or nucleotides in length, about 50 amino acids or nucleotides in length, or more.

[1872] In some embodiments, the genetic element comprises a nucleotide sequence with at least about 75% nucleotide sequence identity, at least about 80%, 85%, 90% 95%, 96%, 97%, 98%, 99% or 100% nucleotide sequence identity to any one of the nucleotide sequences described herein, e.g., as listed in any one of Tables N1-N32. Since the genetic code is degenerate, a homologous nucleotide sequence can include any number of silent base changes, i.e., nucleotide substitutions that nonetheless encode the same amino acid.

### Gene Editing Component

[1873] The genetic element of the anellovector may include one or more genes that encode a component of a gene editing system. Exemplary gene editing systems include the clustered regulatory interspaced short palindromic repeat (CRISPR) system, zinc finger nucleases (ZFNs), and Transcription Activator-Like Effector-based Nucleases (TALEN). ZFNs, TALENs, and CRISPR-based methods are described, e.g., in Gaj et al. Trends Biotechnol. 31.7 (2013):397-405; CRISPR methods of gene editing are described, e.g., in Guan et al., Application of CRISPR-Cas system in gene therapy: Pre-clinical progress in animal model. DNA Repair 2016 October; 46:1-8. doi: 10.1016/j.dnarep.2016.07.004; Zheng et al., Precise gene deletion and replacement using the CRISPR/Cas9 system in human cells. BioTechniques, Vol. 57, No. 3, September 2014, pp. 115-124.

[1874] CRISPR systems are adaptive defense systems originally discovered in bacteria and archaea. CRISPR systems use RNA-guided nucleases termed CRISPR-associated or “Cas” endonucleases (e.g., Cas9 or Cpf1) to cleave foreign DNA. In a typical CRISPR/Cas system, an endonuclease is directed to a target nucleotide sequence (e.g., a site in the genome that is to be sequence-edited) by sequence-specific, non-coding “guide RNAs” that target single- or double-stranded DNA sequences. Three classes (I-III) of CRISPR systems have been identified. The class II CRISPR systems use a single Cas endonuclease (rather than multiple Cas proteins). One class II CRISPR system includes a type II Cas endonuclease such as Cas9, a CRISPR RNA (“crRNA”), and a trans-activating crRNA (“tracrRNA”). The crRNA contains a “guide RNA”, typically about 20-nucleotide RNA sequence that corresponds to a target DNA sequence. The crRNA also contains a region that binds to the tracrRNA to form a partially double-stranded structure which is cleaved by RNase III, resulting in a crRNA/tracrRNA hybrid. The crRNA/tracrRNA hybrid then directs the Cas9 endonuclease to recognize and cleave the target DNA sequence. The target DNA sequence must generally be adjacent to a “protospacer adjacent motif (“PAM”) that is specific for a given Cas endonuclease; however, PAM sequences appear throughout a given genome.

[1875] In some embodiments, the anellovector includes a gene for a CRISPR endonuclease. For example, some CRISPR endonucleases identified from various prokaryotic species have unique PAM sequence requirements; examples of PAM sequences include 5′-NGG (Streptococcus pyogenes), 5′-NNAGAA (Streptococcus thermophilus CRISPRI), 5′-NGGNG (Streptococcus thermophilus CRISPR3), and 5′-NNNGATT (Neisseria meningiditis). Some endonucleases, e.g., Cas9 endonucleases, are associated with G-rich PAM sites, e.g., 5′-NGG, and perform blunt-end cleaving of the target DNA at a location 3 nucleotides upstream from (5′ from) the PAM site. Another class II CRISPR system includes the type V endonuclease Cpf1, which is smaller than Cas9; examples include AsCpf1 (from Acidaminococcus sp.) and LbCpf1 (from Lachnospiraceae sp.). Cpf1 endonucleases, are associated with T-rich PAM sites, e.g., 5′-TTN. Cpf1 can also recognize a 5′-CTA PAM motif. Cpf1 cleaves the target DNA by introducing an offset or staggered double-strand break with a 4- or 5-nucleotide 5′ overhang, for example, cleaving a target DNA with a 5-nucleotide offset or staggered cut located 18 nucleotides downstream from (3′ from) from the PAM site on the coding strand and 23 nucleotides downstream from the PAM site on the complimentary strand; the 5-nucleotide overhang that results from such offset cleavage allows more precise genome editing by DNA insertion by homologous recombination than by insertion at blunt-end cleaved DNA. See, e.g., Zetsche et al. (2015) Cell, 163:759-771.

[1876] A variety of CRISPR associated (Cas) genes may be included in the anellovector. Specific examples of genes are those that encode Cas proteins from class II systems including Cas1, Cas2, Cas3, Cas4, Cas5, Cas6, Cas7, Cas8, Cas9, Cas10, Cpf1, C2C1, or C2C3. In some embodiments, the anellovector includes a gene encoding a Cas protein, e.g., a Cas9 protein, may be from any of a variety of prokaryotic species. In some embodiments, the anellovector includes a gene encoding a particular Cas protein, e.g., a particular Cas9 protein, is selected to recognize a particular protospacer-adjacent motif (PAM) sequence. In some embodiments, the anellovector includes nucleic acids encoding two or more different Cas proteins, or two or more Cas proteins, may be introduced into a cell, zygote, embryo, or animal, e.g., to allow for recognition and modification of sites comprising the same, similar or different PAM motifs. In some embodiments, the anellovector includes a gene encoding a modified Cas protein with a deactivated nuclease, e.g., nuclease-deficient Cas9.

[1877] Whereas wild-type Cas9 protein generates double-strand breaks (DSBs) at specific DNA sequences targeted by a gRNA, a number of CRISPR endonucleases having modified functionalities are known, for example: a “nickase” version of Cas9 generates only a single-strand break; a catalytically inactive Cas9 (“dCas9”) does not cut the target DNA. A gene encoding a dCas9 can be fused with a gene encoding an effector domain to repress (CRISPRi) or activate (CRISPRa) expression of a target gene. For example, the gene may encode a Cas9 fusion with a transcriptional silencer (e.g., a KRAB domain) or a transcriptional activator (e.g., a dCas9-VP64 fusion). A gene encoding a catalytically inactive Cas9 (dCas9) fused to FokI nuclease (“dCas9-FokI”) can be included to generate DSBs at target sequences homologous to two gRNAs. See, e.g., the numerous CRISPR/Cas9 plasmids disclosed in and publicly available from the Addgene repository (Addgene, 75 Sidney St., Suite 550A, Cambridge, MA 02139; addgene.org/crispr/). A “double nickase” Cas9 that introduces two separate double-strand breaks, each directed by a separate guide RNA, is described as achieving more accurate genome editing by Ran et al. (2013) Cell, 154:1380-1389.

[1878] CRISPR technology for editing the genes of eukaryotes is disclosed in US Patent Application Publications 2016/0138008A1 and US2015/0344912A1, and in U.S. Pat. Nos. 8,697,359, 8,771,945, 8,945,839, 8,999,641, 8,993,233, 8,895,308, 8,865,406, 8,889,418, 8,871,445, 8,889,356, 8,932,814, 8,795,965, and 8,906,616. Cpf1 endonuclease and corresponding guide RNAs and PAM sites are disclosed in US Patent Application Publication 2016/0208243 A1.

[1879] In some embodiments, the anellovector comprises a gene encoding a polypeptide described herein, e.g., a targeted nuclease, e.g., a Cas9, e.g., a wild type Cas9, a nickase Cas9 (e.g., Cas9 D10A), a dead Cas9 (dCas9), eSpCas9, Cpf1, C2C1, or C2C3, and a gRNA. The choice of genes encoding the nuclease and gRNA(s) is determined by whether the targeted mutation is a deletion, substitution, or addition of nucleotides, e.g., a deletion, substitution, or addition of nucleotides to a targeted sequence. Genes that encode a catalytically inactive endonuclease e.g., a dead Cas9 (dCas9, e.g., D10A; H840A) tethered with all or a portion of (e.g., biologically active portion of) an (one or more) effector domain (e.g., VP64) create chimeric proteins that can modulate activity and/or expression of one or more target nucleic acids sequences.

[1880] As used herein, a “biologically active portion of an effector domain” is a portion that maintains the function (e.g. completely, partially, or minimally) of an effector domain (e.g., a “minimal” or “core” domain). In some embodiments, the anellovector includes a gene encoding a fusion of a dCas9 with all or a portion of one or more effector domains to create a chimeric protein useful in the methods described herein. Accordingly, in some embodiments, the anellovector includes a gene encoding a dCas9-methylase fusion. In other some embodiments, the anellovector includes a gene encoding a dCas9-enzyme fusion with a site-specific gRNA to target an endogenous gene.

[1881] In other aspects, the anellovector includes a gene encoding 1, 2, 3, 4, 5, 6, 7, 8, 9, 10, 11, 12, 13, 14, 15, 16, 17, 18, 19, 20, or more effector domains (all or a biologically active portion) fused with dCas9.

### Proteinaceous Exterior

[1882] In some embodiments, the anellovector, e.g., synthetic anellovector, comprises a proteinaceous exterior that encloses the genetic element. In some embodiments, the anelloVLP, e.g., synthetic anelloVLP, comprises a proteinaceous exterior and an effector (e.g., an exogenous effector). The proteinaceous exterior can comprise a substantially non-pathogenic exterior protein that fails to elicit an unwanted immune response in a mammal. The proteinaceous exterior of the anellovectors or anelloVLPs typically comprises a substantially non-pathogenic protein that may self-assemble into an icosahedral formation that makes up the proteinaceous exterior.

[1883] In some embodiments, the proteinaceous exterior protein is encoded by a sequence of the genetic element of the anellovector (e.g., is in cis with the genetic element). In other embodiments, the proteinaceous exterior protein is encoded by a nucleic acid separate from the genetic element of the anellovector (e.g., is in trans with the genetic element).

[1884] In some embodiments, the protein, e.g., substantially non-pathogenic protein and/or proteinaceous exterior protein, comprises one or more glycosylated amino acids, e.g., 2, 3, 4, 5, 6, 7, 8, 9, 10, or more.

[1885] In some embodiments, the protein, e.g., substantially non-pathogenic protein and/or proteinaceous exterior protein comprises at least one hydrophilic DNA-binding region, a structural arginine-rich region, a threonine-rich region, a glutamine-rich region, a N-terminal polyarginine sequence, a variable region, a C-terminal polyglutamine/glutamate sequence, and one or more disulfide bridges.

[1886] In some embodiments, the protein is a capsid protein, e.g., has a sequence having at least about 60%, 65%, 70%, 75%, 80%, 85%, 90% 95%, 96%, 97%, 98%, 99%, or 100% sequence identity to a protein encoded by any one of the nucleotide sequences encoding a capsid protein described herein, e.g., an Anellovirus ORF1 sequence or a capsid protein sequence as listed in any one of Tables A1-A32. In some embodiments, the protein or a functional fragment of a capsid protein is encoded by a nucleotide sequence having at least about 60%, 70% 80%, 85%, 90% 95%, 96%, 97%, 98%, 99%, or 100% sequence identity to any one of the nucleotide sequences described herein, e.g., an Anellovirus capsid sequence or a capsid protein sequence as listed in any one of Tables A1-A32. In some embodiments, the protein comprises a capsid protein or a functional fragment of a capsid protein that is encoded by a capsid nucleotide sequence or a sequence having at least about 60%, 65%, 70%, 75%, 80%, 85%, 90% 95%, 96%, 97%, 98%, 99%, or 100% nucleotide sequence identity to any one of the nucleotide sequences described herein, e.g., an Anellovirus capsid sequence or a capsid protein sequence as listed in any one of Tables N1-N32.

[1887] In some embodiments, the anellovector comprises a nucleotide sequence encoding a capsid protein or a functional fragment of a capsid protein or a sequence having at least about 60%, 70% 80%, 85%, 90% 95%, 96%, 97%, 98%, 99%, or 100% sequence identity to any one of the amino acid sequences described herein, e.g., an Anellovirus capsid sequence or a capsid protein sequence in any one of Tables A1-A32. In some embodiments, the anellovector comprises a nucleotide sequence encoding a capsid protein or a functional fragment of a capsid protein or a sequence having at least about 60%, 65%, 70%, 75%, 80%, 85%, 90% 95%, 96%, 97%, 98%, 99%, or 100% sequence identity to any one of the amino acid sequences described herein, e.g., an Anellovirus capsid sequence or a capsid protein sequence in any one of Tables A1-A32.

[1888] In some embodiments, the anellovector comprises a nucleotide sequence encoding an amino acid sequence having about position 1 to about position 150 (e.g., or any subset of amino acids within each range, e.g., about position 20 to about position 35, about position 25 to about position 30, about position 26 to about 30), about position 150 to about position 390 (e.g., or any subset of amino acids within each range, e.g., about position 200 to about position 380, about position 205 to about position 375, about position 205 to about 371), about 390 to about position 525, about position 525 to about position 850 (e.g., or any subset of amino acids within each range, e.g., about position 530 to about position 840, about position 545 to about position 830, about position 550 to about 820), about 850 to about position 950 (e.g., or any subset of amino acids within each range, e.g., about position 860 to about position 940, about position 870 to about position 930, about position 880 to about 923) of the amino acid sequences described herein, an Anellovirus amino acid sequence, e.g., as listed in any one of Tables A1-A32, or a functional fragment thereof. In some embodiments, the protein comprises an amino acid sequence or a functional fragment thereof or a sequence having at least about 60%, 65%, 70%, 75%, 80%, 85%, 90% 95%, 96%, 97%, 98%, 99%, or 100% sequence identity to about position 1 to about position 150 (e.g., or any subset of amino acids within each range as described herein), about position 150 to about position 390, about position 390 to about position 525, about position 525 to about position 850, about position 850 to about position 950 of the amino acid sequences described herein, an Anellovirus amino acid sequence, e.g., as listed in any one of Tables A1-A32.

[1889] In some embodiments, the protein comprises an amino acid sequence or a functional fragment thereof or a sequence having at least about 60%, 65%, 70%, 75%, 80%, 85%, 90% 95%, 96%, 97%, 98%, 99%, or 100% sequence identity to any one of the amino acid sequences or ranges of amino acids described herein, an Anellovirus amino acid sequence, e.g., as listed in any one of Tables A1-A32. In some embodiments, the ranges of amino acids with less sequence identity may provide one or more of the properties described herein and differences in cell/tissue/species specificity (e.g. tropism).

[1890] In some embodiments, the anellovector or anelloVLP lacks lipids in the proteinaceous exterior. In some embodiments, the anellovector or anelloVLP lacks a lipid bilayer, e.g., a viral envelope. In some embodiments, the interior of the anellovector or anelloVLP is entirely covered (e.g., 100% coverage) by a proteinaceous exterior. In some embodiments, the interior of the anellovector or anelloVLP is less than 100% covered by the proteinaceous exterior, e.g., 95%, 90%, 85%, 80%, 70%, 60%, 50% or less coverage. In some embodiments, the proteinaceous exterior comprises gaps or discontinuities, e.g., permitting permeability to water, ions, peptides, or small molecules, e.g., so long as the genetic element is retained in the anellovector.

[1891] In some embodiments, the proteinaceous exterior comprises one or more proteins or polypeptides that specifically recognize and/or bind a host cell, e.g., a complementary protein or polypeptide, to mediate entry of the genetic element into the host cell.

[1892] In some embodiments, the proteinaceous exterior comprises one or more of the following: one or more glycosylated proteins, a hydrophilic DNA-binding region, a structural arginine-rich region, a threonine-rich region, a glutamine-rich region, a N-terminal polyarginine sequence, a variable region, a C-terminal polyglutamine/glutamate sequence, and one or more disulfide bridges. For example, the proteinaceous exterior comprises a protein encoded by an Anellovirus ORF1 described herein.

[1893] In some embodiments, the proteinaceous exterior comprises one or more of the following characteristics: an icosahedral symmetry, recognizes and/or binds a molecule that interacts with one or more host cell molecules to mediate entry into the host cell, lacks lipid molecules, lacks carbohydrates, is pH and temperature stable, is detergent resistant, and is substantially non-immunogenic or non-pathogenic in a host.

### Surface Moieties

[1894] An anellovector or anelloVLP as described herein may, in some instances, include one or more moieties attached to its surface (e.g., a surface moiety that can act as an effector and/or a targeting agent). In some instances, an anellovector or anelloVLP comprises more than one distinct surface moiety (e.g., a first surface moiety having an effector function as described herein and a second surface moiety that targets the anellovector or anelloVLP to a cell or tissue of interest). In some instances, the surface moiety is covalently attached to the surface of the anellovector or anelloVLP. For example, the surface moiety may be covalently attached to the proteinaceous exterior or a component thereof (e.g., covalently attached to an ORF1 molecule of the proteinaceous exterior). In certain embodiments, the surface moiety is fused to an ORF1 molecule. In some instances, the surface moiety is noncovalently attached to the surface of the anellovector or anelloVLP. For example, the surface moiety may be noncovalently bound to the proteinaceous exterior or a component thereof (e.g., noncovalently bound to an ORF1 molecule of the proteinaceous exterior). In certain embodiments, the surface moiety comprises a region that specifically binds to a cognate moiety on or attached to the ORF1 molecule. In an embodiment, the ORF1 molecule comprises a binding moiety (e.g., an antibody molecule) that specifically recognizes an epitope on the region on the surface moiety. In an embodiment, the surface moiety comprises a binding moiety (e.g., an antibody molecule) that specifically recognizes an epitope on the ORF1 molecule. In an embodiment, the surface moiety comprises a streptavidin moiety that binds to a biotin moiety on the surface of the anellovector or anelloVLP (e.g., a biotin moiety attached to an ORF1 molecule of the proteinaceous exterior of the anellovector or anelloVLP). In an embodiment, the surface moiety comprises a biotin moiety that binds to a streptavidin moiety on the surface of the anellovector or anelloVLP (e.g., a streptavidin moiety attached to an ORF1 molecule of the proteinaceous exterior of the anellovector or anelloVLP).

[1895] In embodiments, all copies of an ORF1 molecule in the proteinaceous exterior of an anellovector or anelloVLP are attached to copies of the surface moiety. In embodiments, some copies of the ORF1 molecule in the proteinaceous exterior of an anellovector or anelloVLP are attached to copies of the surface moiety and some copies of the ORF1 molecule in the proteinaceous exterior of an anellovector or anelloVLP are not attached to copies of the surface moiety. In embodiments, some copies of the ORF1 molecule in the proteinaceous exterior of an anellovector or anelloVLP are attached to copies of a first surface moiety and some copies of the ORF1 molecule in the proteinaceous exterior of an anellovector or anelloVLP are attached to copies of a second surface moiety. In embodiments, some copies of the ORF1 molecule in the proteinaceous exterior of an anellovector or anelloVLP are attached to copies of a third surface moiety.

[1896] In some embodiments, all copies of an ORF1 molecule in the proteinaceous exterior of an anellovector or anelloVLP are attached at the same position (e.g., a lysine residue) of the ORF1 molecule to a copy of a surface moiety. In some embodiments, a first copy of an ORF1 molecule in the proteinaceous exterior of an anellovector or anelloVLP is attached at a first position (e.g., a first lysine residue) of the ORF1 molecule to a first copy of a surface moiety, and a second copy of an ORF1 molecule in the proteinaceous exterior of an anellovector or anelloVLP is attached at a second position (e.g., a second lysine residue) of the ORF1 molecule to a second of a surface moiety. In some embodiments, the proteinaceous exterior further comprises one or more copies of an ORF1 molecule having a surface moiety attached to a one or more additional positions (e.g., one or more additional lysine residues). In certain embodiments, the first lysine residue, the second lysine residue, and/or the one or more additional lysine residues are positioned on the surface of the proteinaceous exterior. In some embodiments, the surface moiety is attached to the ORF1 molecule via click chemistry or genetic grafting, e.g., as described herein.

[1897] In some instances, the surface moiety comprises an effector function (e.g., as described herein). For example, the surface moiety may modulate a biological activity, e.g., of a target cell or organ. In some instances, the surface moiety induces modulation of the biological activity via binding to a cognate moiety on a target cell. For example, the surface moiety may comprise a ligand that binds to a receptor on the surface of the target cell, e.g., wherein binding of the surface moiety to the receptor initiates a downstream signaling cascade of interest. In some instances, the effector activity comprises increasing or decreasing enzymatic activity, gene expression, cell signaling, and/or cellular or organ function within a target cell or organ. Effector activities may also include binding regulatory proteins to modulate activity of the regulator, such as transcription or translation. Effector activities also may include activator or inhibitor functions.

[1898] In some instances, the surface moiety can target the anellovector or anelloVLP to a target cell. For example, the surface moiety may specifically bind to a cognate moiety on the surface of the target cell. The cognate moiety on the surface of the target cell may be, for example, a molecule specifically expressed or preferentially expressed by the target cell. The cognate moiety may be, for example, a polypeptide, lipid, sugar, or small molecule. In certain embodiments, the cognate moiety is a transmembrane protein (e.g., comprising an extracellular domain that binds to the surface moiety of the anellovector or the anelloVLP). In certain embodiments, the cognate moiety is tethered to the surface of the cell (e.g., via a GPI anchor). In some instances, the surface moiety provides a tropism (e.g., to a target tissue or target cell type) for the anellovector or anelloVLP.

[1899] In some instances, the surface moiety comprises an effector function and a targeting function, e.g., as described herein. In some instances, the surface moiety comprises a domain having an effector function as described herein. In some instances, the surface moiety comprises a domain having a targeting function as described herein.

[1900] In some instances, the surface moiety binds specifically to one cognate moiety. In some embodiments, the surface moiety binds specifically to more than one cognate moiety. In some embodiments, the surface moiety comprises a plurality of binding regions, for example, each of which specifically binds to a different cognate moiety. For example, the surface moiety may be bispecific or trispecific. In some embodiments, the surface moiety comprises a plurality of binding regions, for example, each of which binds to the same cognate moiety or copies thereof (e.g., at different epitopes of the cognate moiety or the same epitope of the cognate moiety). In certain embodiments, the surface moiety having multiple binding regions that specifically bind to the same cognate moiety results in greater avidity for the target moiety.

### Click Chemistry

[1901] In an aspect, the disclosure provides an ORF1 molecule comprising: (i) the amino acid sequence of an Anellovirus ORF1 protein, or an amino acid sequence having at least 75%, 80%, 85%, 90%, 95%, 96%, 97%, 98%, or 99% sequence identity thereto; and (ii) a click handle (e.g., an NHS click handle or a maleimide click handle, e.g., as described herein). In certain embodiments, the click handle is covalently attached to the ORF1 molecule. In certain embodiments, the click handle is noncovalently attached to the ORF1 molecule. In certain embodiments, the click handle is used to attach the ORF1 molecule to a surface moiety, e.g., via a click reaction, e.g., as described herein.

[1902] A “click handle,” as that term is used herein, refers to a chemical moiety that is capable of reacting with a second click handle in a click reaction. In some embodiments, a click handle comprises an NHS moiety and/or a maleimide moiety. In certain embodiments, a click handle comprises a DBCO moiety. In certain embodiments, a click handle comprises an azide moiety. In some embodiments, a click handle is attached to a polypeptide (e.g., an ORF1 molecule). In other embodiments, a click handle comprises a reactive group capable of forming a covalent bond with a polypeptide (e.g., an ORF1 molecule). A “click reaction”, as that term is used herein, refers to a range of reactions used to covalently link a first and a second moiety, for convenient production of linked products. It typically has one or more of the following characteristics: it is fast, is specific, is high-yield, is efficient, is spontaneous, does not significantly alter biocompatibility of the linked entities, has a high reaction rate, produces a stable product, favors production of a single reaction product, has high atom economy, is chemoselective, is modular, is stereoselective, is insensitive to oxygen, is insensitive to water, is high purity, generates only inoffensive or relatively non-toxic byproducts that can be removed by nonchromatographic methods (e.g., crystallization or distillation), needs no solvent or can be performed in a solvent that is benign or physiologically compatible, e.g., water, stable under physiological conditions. Examples include an alkyne/azide reaction, a diene/dienophile reaction, or a thiol/alkene reaction. Other reactions can be used. In embodiments, a click reaction has a second order forward rate constant of 10-200 M-1s-1, 1-20 M-1s-1, or at least 1, 2, 3, 5, 10, 20, 50, 60, 100, 200, 500, 1E3, 2E3, 5E3, 1E4, 2E4, 5E4, 1E5, 2E5, 5E5, or 1E6 M-1s-1, e.g., at 20° C. in PBS. In some embodiments, a click reaction has at least 75%, 80%, 85%, 90%, 95%, 96%, 97%, 98%, or 99% yield, e.g., for a reaction time of 1 hour at 20° C. in PBS.

[1903] In some embodiments, a surface moiety is attached to a polypeptide by conjugation of a lysine residue on the surface of the polypeptide to an NHS click handle on the surface moiety (e.g., as described in Example 2 or 3 herein). In some embodiments, a surface moiety is attached to a polypeptide by conjugation of a lysine residue on the surface of the surface moiety to an NHS click handle on the polypeptide (e.g., as described in Example 2 or 3 herein).

[1904] In some embodiments, a surface moiety is attached to a polypeptide by conjugation of a cysteine residue on the surface of the polypeptide to a maleimide click handle on the surface moiety (e.g., as described in Example 4 herein). In some embodiments, a surface moiety is attached to a polypeptide by conjugation of a cysteine residue on the surface of the surface moiety to a maleimide click handle on the polypeptide (e.g., as described in Example 4 herein).

[1905] In an aspect, the disclosure provides an ORF1 molecule comprising a surface moiety, wherein the surface moiety was attached to the ORF1 molecule via a click reaction.

[1906] In an aspect, the disclosure provides a particle (e.g., an anellovector or anelloVLP) comprising: (i) a proteinaceous exterior comprising an ORF1 molecule; and (ii) a click handle (e.g., an NHS click handle and/or a maleimide click handle, e.g., as described herein). In certain embodiments, the click handle is covalently attached to the ORF1 molecule. In some embodiments, the particle is an anellovector comprising a genetic element enclosed in the proteinaceous exterior. In some embodiments, the particle is an anelloVLP comprising an effector (e.g., an exogenous effector), e.g., enclosed in the proteinaceous exterior.

### Mutations of Surface Lysines

[1907] In an aspect, the disclosure provides an ORF1 molecule comprising the amino acid sequence of an Anellovirus ORF1 protein (or an amino acid sequence having at least 75%, 80%, 85%, 90%, 95%, 96%, 97%, 98%, or 99% sequence identity thereto), wherein at least 30%, 40%, 50%, 60%, 70%, 75%, 80%, 85%, 90%, 95%, 96%, 97%, 98%, 99%, or 100% of the lysine residues in the amino acid sequence of the Anellovirus ORF1 protein has been mutated (e.g., substituted with another amino acid, e.g., threonine, alanine, serine, asparagine, or glutamine).

[1908] In some embodiments, all but one lysine residue of the Anellovirus ORF1 protein that are exposed from the surface of a proteinaceous exterior comprising the Anellovirus ORF1 protein are mutated (e.g., substituted with another amino acid, e.g., serine or alanine). In some embodiments, all lysine residues of the Anellovirus ORF1 protein that are exposed from the surface of a proteinaceous exterior comprising the Anellovirus ORF1 protein are mutated (e.g., substituted with another amino acid, e.g., serine or alanine). In some embodiments, all but one of the lysine residues of the Anellovirus ORF1 protein are mutated (e.g., substituted with another amino acid, e.g., serine or alanine). In certain embodiments, the one lysine residue not mutated is exposed on the surface of a proteinaceous exterior comprising the Anellovirus ORF1 protein. In some embodiments, all lysine residues of the Anellovirus ORF1 protein are mutated (e.g., substituted with another amino acid, e.g., serine or alanine). In some embodiments, the ORF1 molecule further comprises a lysine residue not found in the amino acid sequence of the Anellovirus ORF1 protein (e.g., a lysine residue inserted or substituted into the Anellovirus ORF1 protein sequence, or a lysine residue attached to the N-terminal or C-terminal end of the Anellovirus ORF1 protein sequence). Such ORF1 molecules may be useful, for example, for controlling covalent attachment of a surface moiety to a lysine residue in the proteinaceous exterior.

### Mutations of Surface Cysteines

[1909] In an aspect, the disclosure provides an ORF1 molecule comprising the amino acid sequence of an Anellovirus ORF1 protein (or an amino acid sequence having at least 75%, 80%, 85%, 90%, 95%, 96%, 97%, 98%, or 99% sequence identity thereto), wherein at least 30%, 40%, 50%, 60%, 70%, 75%, 80%, 85%, 90%, 95%, 96%, 97%, 98%, 99%, or 100% of the cysteine residues in the amino acid sequence of the Anellovirus ORF1 protein has been mutated (e.g., substituted with another amino acid, e.g., threonine, alanine, serine, asparagine, or glutamine).

[1910] In some embodiments, all but one cysteine residue of the Anellovirus ORF1 protein that are exposed from the surface of a proteinaceous exterior comprising the Anellovirus ORF1 protein are mutated (e.g., substituted with another amino acid, e.g., serine or alanine). In some embodiments, all cysteine residues of the Anellovirus ORF1 protein that are exposed from the surface of a proteinaceous exterior comprising the Anellovirus ORF1 protein are mutated (e.g., substituted with another amino acid, e.g., serine or alanine). In some embodiments, all but one of the cysteine residues of the Anellovirus ORF1 protein are mutated (e.g., substituted with another amino acid, e.g., serine or alanine). In certain embodiments, the one cysteine residue not mutated is exposed on the surface of a proteinaceous exterior comprising the Anellovirus ORF1 protein. In some embodiments, all cysteine residues of the Anellovirus ORF1 protein are mutated (e.g., substituted with another amino acid, e.g., serine or alanine). In some embodiments, the ORF1 molecule further comprises a cysteine residue not found in the amino acid sequence of the Anellovirus ORF1 protein (e.g., a cysteine residue inserted or substituted into the Anellovirus ORF1 protein sequence, or a cysteine residue attached to the N-terminal or C-terminal end of the Anellovirus ORF1 protein sequence). Such ORF1 molecules may be useful, for example, for controlling covalent attachment of a surface moiety to a cysteine residue in the proteinaceous exterior.

### Polypeptides

[1911] The surface moiety can, in some instances, comprise a polypeptide. In some embodiments, the polypeptide is a about 5-10, 10-15, 15-20, 20-25, 25-30, 30-40, 40-50, 50-100, 100-150, 150-200, 200-250, 250-300, 300-400, 400-500, 500-600, 600-700, 700-800, 800-900, 900-1000, 1000-1500, 1500-2000, 2000-2500, 2500-3000, 3000-4000, or 4000-5000 amino acids in length). In some embodiments, the surface moiety is a polypeptide fused to a protein of the anellovector or anelloVLP (e.g., an ORF1 molecule of the anellovector or anelloVLP). In certain embodiments, the peptide is linear or branched.

[1912] In some embodiments, the surface moiety comprises an antibody molecule (e.g., an antibody or an antigen-binding fragment thereof). In certain embodiments, the surface moiety comprises an Fv, Fab, Fab′, Fab′-SH, F(ab′)₂, diabody, linear antibody, single-chain antibody molecule (e.g. scFv), or a multispecific antibody formed from antibody fragments. In certain embodiments, the surface moiety is a multispecific antibody molecule (e.g., a bispecific antibody molecule or a trispecific antibody molecule). In some embodiments, the surface moiety is selected from a hormone, cytokine, enzyme, transcription factor, receptor, ligand, transporter, secreted protein, carrier protein, structural protein, or a functional fragment thereof (e.g., as described herein). In some embodiments, the surface moiety comprises a polypeptide effector (e.g., as described herein). In certain embodiments, the surface moiety comprises a therapeutic effector (e.g., as described herein). In embodiments, the surface moiety comprises a regulatory intracellular polypeptide (e.g., as described herein). In embodiments, the surface moiety comprises a secreted polypeptide effector (e.g., as described herein). In embodiments, the surface moiety comprises a viral polypeptide or peptide. In embodiments, the surface moiety comprises a SARS-CoV-2 polypeptide or peptide (e.g., a receptor binding domain, e.g., of a spike protein, e.g., as described herein), or a polypeptide having at least 75%, 80%, 85%, 90%, 95%, 96%, 97%, 98%, or 99% sequence identity thereto. In embodiments, the surface moiety comprises a polypeptide having at least 75%, 80%, 85%, 90%, 95%, 96%, 97%, 98%, 99%, or 100% amino acid sequence identity to amino acids 319-541 from SARS-CoV-2 coronavirus spike protein (e.g., according to ThermoFisher Catalog #RP-87704). In some embodiments, the surface moiety comprises a binding moiety (e.g., a biotin moiety). In some embodiments, the surface moiety comprises a fluorophore (e.g., an Alexa Fluor moiety, e.g., Alexa Fluor 647).

[1913] In some embodiments, a polypeptide surface moiety is displayed on the surface of the anellovector or anelloVLP. In some embodiments, the surface moiety is covalently attached to the surface (e.g., proteinaceous exterior) of the anellovector or anelloVLP. In certain embodiments, the surface moiety is a polypeptide fused to an ORF1 molecule. In embodiments, the surface moiety is a heterologous domain of an ORF1 molecule. In embodiments, the surface moiety replaces a region (e.g., a subdomain as described herein, e.g., an HVR) of an ORF1 protein. In embodiments, all copies of the ORF1 molecule in the proteinaceous exterior of an anellovector or anelloVLP are fused to copies of the surface moiety. In embodiments, some copies of the ORF1 molecule in the proteinaceous exterior of an anellovector or anelloVLP are fused to copies of the surface moiety and some copies of the ORF1 molecule in the proteinaceous exterior of an anellovector or anelloVLP are not fused to copies of the surface moiety. In embodiments, some copies of the ORF1 molecule in the proteinaceous exterior of an anellovector or anelloVLP are fused to copies of a first surface moiety and some copies of the ORF1 molecule in the proteinaceous exterior of an anellovector or anelloVLP are fused to copies of a second surface moiety.

[1914] In some embodiments, the surface moiety is noncovalently attached to the surface (e.g., proteinaceous exterior) of the anellovector or anelloVLP. For example, the surface moiety may comprise a binding domain that binds to a region on the surface (e.g., proteinaceous exterior) of the anellovector or anelloVLP. In an embodiment, the surface moiety comprises an antibody molecule that specifically binds to an ORF1 molecule of the proteinaceous exterior of the anellovector or anelloVLP.

### Genetic Grafting of ORF1 to a Surface Moiety

[1915] In some embodiments, an ORF1 molecule comprises the amino acid sequence of a surface moiety, e.g., as described herein. An ORF1 molecule may be fused (e.g., at the N-terminus or C-terminus) to the surface moiety. In some embodiments, a surface moiety is grafted into the sequence of the ORF1 molecule. For example, a surface moiety may be inserted within or between domains of the ORF1 molecule. In some instances, a surface moiety replaces at least a portion (e.g., at least 5-10, 10-20, 20-30, 30-40, 40-50, 50-60, 60-70, 70-80, 80-90, 90-100, 100-150, 150-200, or 200-300 contiguous amino acid residues) of a domain of the ORF1 molecule. In some embodiments, the surface moiety replaces the entirety of at least one domain of the ORF1 molecule.

[1916] In some embodiments, an ORF1 molecule grafted to a surface moiety comprises a deletion or truncation of a structural arginine-rich region. In certain embodiments, the surface moiety replaces the structural arginine-rich region, or a portion thereof (e.g., a portion consisting of 5-10, 10-15, 15-20, 20-30, 30-35, or 35-40 amino acids thereof). In certain embodiments, the surface moiety is grafted at or within 1-5, 5-10, 10-15, 15-20, 20-25, 25-30, 30-35, or 35-40 amino acid residues of a structural jelly-roll region or a jelly-roll B—H strands subdomain as described herein.

[1917] In some embodiments, an ORF1 molecule grafted to a surface moiety comprises a deletion or truncation of a structural hypervariable region (HVR) (e.g., as described herein). In certain embodiments, the surface moiety replaces the structural HVR, or a portion thereof (e.g., a portion consisting of 5-10, 10-15, 15-20, 20-30, 30-40, 40-50, 50-60, 60-70, 70-80, 80-90, 90-100, 100-110, 110-120, 120-130, 130-140, or 140-150 amino acids thereof). In some embodiments, an ORF1 molecule grafted to a surface moiety comprises a deletion or truncation of one or more of a P1-1 domain, P2 domain, and/or P1-2 domain (e.g., as described herein). In certain embodiments, the surface moiety replaces the P1-1 domain, P2 domain, and/or P1-2 domain, or a portion thereof (e.g., a portion consisting of 5-10, 10-15, 15-20, 20-30, 30-40, 40-50, 50-60, 60-70, 70-80, 80-90, 90-100, 100-110, 110-120, 120-130, 130-140, or 140-150 amino acids thereof). In certain embodiments, the surface moiety is grafted at or within 1-5, 5-10, 10-15, 15-20, 20-25, 25-30, 30-35, 35-40, 40-50, 50-60, 60-70, 70-80, 80-90, 90-100, 100-125, 125-150, 150-175, or 175-200 amino acid residues of the C-terminal end of a structural jelly-roll region or jelly-roll B—H strands subdomain as described herein. In certain embodiments, the surface moiety is grafted at or within 1-5, 5-10, 10-15, 15-20, 20-25, 25-30, 30-35, 35-40, 40-50, 50-60, 60-70, 70-80, 80-90, 90-100, 100-125, 125-150, 150-175, or 175-200 amino acid residues of the N-terminal end of a structural N22 domain, jelly-roll I strand subdomain, or structural CTD as described herein.

[1918] In some embodiments, an ORF1 molecule grafted to a surface moiety comprises a deletion or truncation of a structural C-terminal domain (CTD). In certain embodiments, the surface moiety replaces the structural CTD, or a portion thereof (e.g., a portion consisting of 5-10, 10-15, 15-20, 20-30, 30-40, 40-50, 50-60, 60-70, 70-80, 80-90, 90-100, 100-110, 110-120, or 120-130 amino acids thereof). In certain embodiments, the surface moiety is grafted at or within 1-5, 5-10, 10-15, 15-20, 20-25, 25-30, 30-35, 35-40, 40-50, 50-60, 60-70, 70-80, 80-90, 90-100, 100-125, 125-150, 150-175, or 175-200 amino acid residues of a structural N22 domain or a jelly-roll I strand subdomain as described herein.

### Exemplary ORF1 Molecules Attached to Surface Moieties

[1919] In some embodiments, a surface moiety and ORF1 fusion protein comprises an amino acid sequence as listed in Table E1 below, or an amino acid sequence having at least 75%, 80%, 85%, 90%, 95%, 96%, 97%, 98%, or 99% sequence identity thereto. In some embodiments, a surface moiety comprises an amino acid sequence as listed in Table E1 below, or an amino acid sequence having at least 75%, 80%, 85%, 90%, 95%, 96%, 97%, 98%, or 99% sequence identity thereto. In some embodiments, a surface moiety comprises a CS protein, or a functional fragment thereof (e.g., a fragment comprising the 184 C-terminal residues of a CS protein). In some embodiments, a surface moiety comprises a hepatitis B virus surface antigen. In some embodiments, a surface moiety comprises one or more (e.g., 1, 2, 3, 4, 5, or 6) NANP peptides (e.g., NANP-2 peptides). In some embodiments, a surface moiety comprises a cysteine residue (e.g., a C-terminal cysteine residue). In some embodiments, a surface moiety comprises an NHS click handle (e.g., as described herein).

[1920] In an aspect, the disclosure provides a nucleic acid molecule encoding a fusion protein comprising a surface moiety and an ORF1 molecule (e.g., as described herein).

[1921] In an aspect, the disclosure provides a polypeptide comprising a CCN5 protein and a C-terminal cysteine residue. In some embodiments, the polypeptide comprises the amino acid sequence of CCN5 CTerMCys as listed in Table E1 below, or an amino acid sequence having at least 75%, 80%, 85%, 90%, 95%, 96%, 97%, 98%, or 99% sequence identity thereto. In an aspect, the disclosure provides a polypeptide comprising an aflibercept protein and a C-terminal cysteine residue. In some embodiments, the polypeptide comprises the amino acid sequence of aflibercept as listed in Table E1 below, or an amino acid sequence having at least 75%, 80%, 85%, 90%, 95%, 96%, 97%, 98%, or 99% sequence identity thereto. In an aspect, the disclosure provides a polypeptide comprising ranibizumab and a C-terminal cysteine residue. In some embodiments, the polypeptide comprises the amino acid sequence of ranibizumab HC malE_CTermCys as listed in Table E1 below, or an amino acid sequence having at least 75%, 80%, 85%, 90%, 95%, 96%, 97%, 98%, or 99% sequence identity thereto. In some embodiments, the polypeptide comprises the amino acid sequence of scFab RaniHC-link50-LC malE_CTermCys as listed in Table E1 below, or an amino acid sequence having at least 75%, 80%, 85%, 90%, 95%, 96%, 97%, 98%, or 99% sequence identity thereto. In an aspect, the disclosure provides a polypeptide comprising bevacizumab and a C-terminal cysteine residue. In some embodiments, the polypeptide comprises the amino acid sequence of bevacizumab HC malE_CTermCys as listed in Table E1 below, or an amino acid sequence having at least 75%, 80%, 85%, 90%, 95%, 96%, 97%, 98%, or 99% sequence identity thereto.

### X-Fold Symmetry

[1922] In some embodiments, an ORF1 molecule as described herein comprises a surface moiety situated at a position such that, when the ORF1 molecule is complexed with one or more additional copies of the ORF1 molecules (each attached to another surface moiety, e.g., copies of the same surface moiety or one or more different surface moieties), the surface moieties form a multimer. In certain embodiments, a complex of two such ORF1 molecules attached to surface moieties results in the formation of a dimer of the surface moieties. In certain embodiments, a complex of three such ORF1 molecules attached to surface moieties results in the formation of a trimer of the surface moieties. In certain embodiments, a complex of five such ORF1 molecules attached to surface moieties results in the formation of a pentamer of the surface moieties.

[1923] To form a multimer of surface moieties, the surface moieties are generally attached to the ORF1 molecule at a surface-exposed portion of the ORF1 molecule. In some embodiments, the surface-exposed portion of the ORF1 molecule is part of a structural hypervariable region (HVR) of the ORF1 molecule, e.g., as described herein. In some embodiments, the surface-exposed portion of the ORF1 molecule is part of a P1 domain (e.g., a P1-1 subdomain or a P1-2 subdomain) of the ORF1 molecule, e.g., as described herein. In some embodiments, the surface-exposed portion of the ORF1 molecule is part of a P2 domain of the ORF1 molecule, e.g., as described herein. In certain embodiments, the surface moiety is fused to, replaces, or is attached at or between residues of the ORF1 molecule corresponding to positions 284-285 of a Ring10 ORF1 protein. In certain embodiments, the surface moiety is fused to, replaces, or is attached at or between residues of the ORF1 molecule corresponding to positions 328-329 of a Ring10 ORF1 protein. In certain embodiments, the surface moiety is fused to, replaces, or is attached at or between residues of the ORF1 molecule corresponding to positions 256-383 of a Ring10 ORF1 protein. In certain embodiments, the surface moiety is fused to, replaces, or is attached at or between residues of the ORF1 molecule corresponding to positions 251-383 of a Ring10 ORF1 protein. In certain embodiments, the surface moiety is fused to, replaces, or is attached at or between residues of the ORF1 molecule corresponding to positions 251-384 of a Ring10 ORF1 protein. In certain embodiments, the surface moiety is attached at the amino acid residue (e.g., a cysteine residue) corresponding to position 254, 263, 264, 265, 272, 273, 274, 276, 283, 284, 285, 287, 288, 290, 291, 308, 311, 312, 313, 314, 316, 317, 318, 319, 321, 324, 328, 329, 341, 343, 354, 358, 361, 362, 363, 364, 365, 368, 369, 371, 374, 376, 378, 380, or 381 of Ring 10 ORF1, e.g., in an ORF1 domain (e.g., within the HVR or P2 domain).

[1924] In an aspect, the disclosure provides an ORF1 molecule comprising the amino acid sequence of an ORF1 protein comprising at least one mutation (e.g., deletion, substitution, addition, insertion, or frameshift) in a surface-exposed region relative to a wild-type ORF1 protein sequence (e.g., as described herein. In some embodiments, the surface-exposed region comprises the region corresponding amino acids 251-386 of the amino acid sequence of Ring 10 ORF1 (e.g., as described herein).

[1925] In an aspect, the disclosure provides an ORF1 molecule comprising the amino acid sequence of an ORF1 protein comprising at least one mutation (e.g., deletion, substitution, addition, insertion, or frameshift) in the HVR relative to a wild-type ORF1 protein sequence (e.g., as described herein).

[1926] In some embodiments, the glutamine residue corresponding to Q287 of Ring 10 (e.g., as described herein) has been mutated (e.g., substituted). In some embodiments, the glutamine residue corresponding to Q287 of Ring 10 has been mutated to a cysteine residue. In certain embodiments, the ORF1 molecule comprises the amino acid sequence of the Ring 10 ORF1 protein, or an amino acid sequence having at least 75%, 80%, 85%, 90%, 95%, 96%, 97%, 98%, or 99% sequence identity thereto, and a Q287C mutation.

[1927] In some embodiments, the threonine residue corresponding to T365 of Ring 10 (e.g., as described herein) has been mutated (e.g., substituted). In some embodiments, the threonine residue corresponding to T365 of Ring 10 has been mutated to a cysteine residue. In certain embodiments, the ORF1 molecule comprises the amino acid sequence of the Ring 10 ORF1 protein, or an amino acid sequence having at least 75%, 80%, 85%, 90%, 95%, 96%, 97%, 98%, or 99% sequence identity thereto, and a T365C mutation.

[1928] In an aspect, the disclosure provides a polypeptide comprising an amino acid sequence as listed in Table E1 below, or an amino acid sequence having at least 75%, 80%, 85%, 90%, 95%, 96%, 97%, 98%, or 99% sequence identity thereto. In some embodiments, the polypeptide further comprises the amino acid sequence of an ORF1 protein (e.g., as described herein), or an amino acid sequence having at least 75%, 80%, 85%, 90%, 95%, 96%, 97%, 98%, or 99% sequence identity thereto.

[1929] In an aspect, the disclosure provides a nucleic acid molecule encoding a polypeptide comprising an amino acid sequence as listed in Table E1 below, or an amino acid sequence having at least 75%, 80%, 85%, 90%, 95%, 96%, 97%, 98%, or 99% sequence identity thereto. In some embodiments, the polypeptide encoded by the nucleic acid molecule further comprises the amino acid sequence of an ORF1 protein (e.g., as described herein), or an amino acid sequence having at least 75%, 80%, 85%, 90%, 95%, 96%, 97%, 98%, or 99% sequence identity thereto. In some embodiments, an anellovector as described herein comprises a proteinaceous exterior comprising an ORF1 molecule as described above. In some embodiments, an anellovector as described herein comprises a proteinaceous exterior comprising an ORF1 molecule encoded by a nucleic acid molecule as described above. In some embodiments, an anelloVLP as described herein comprises a proteinaceous exterior comprising an ORF1 molecule as described above. In some embodiments, an anelloVLP as described herein comprises a proteinaceous exterior comprising an ORF1 molecule encoded by a nucleic acid molecule as described above.

### Nucleic Acid Molecules

[1930] The surface moiety may, in some instances, comprise a nucleic acid molecule. In some embodiments, the surface moiety comprises DNA (e.g., single-stranded DNA or double-stranded DNA). In some embodiments, the surface moiety comprises RNA (e.g., single-stranded RNA or double-stranded RNA). In some embodiments, the surface moiety comprises DNA and RNA (e.g., a strand of DNA hybridized to a strand of RNA). In some embodiments, the surface moiety comprises an oligonucleotide (e.g., an oligonucleotide having a length of about 5-10, 10-15, 15-20, 20-25, 25-30, 30-35, 35-40, 40-45, 45-50, 50-60, 60-70, 70-80, 80-90, or 90-100 nucleotides). In some embodiments, the surface moiety comprises a functional nucleic acid molecule (e.g., a functional RNA). In certain embodiments, the surface moiety comprises an mRNA, siRNA, miRNA, or tRNA.

### Small Molecules

[1931] The surface moiety may, in some instances, comprise a small molecule. In some embodiments, the small molecule has a molecular weight less than about 5,000 grams per mole, e.g., organic or inorganic compounds having a molecular weight less than about 2,000 grams per mole, e.g., organic or inorganic compounds having a molecular weight less than about 1,000 grams per mole, e.g., organic or inorganic compounds having a molecular weight less than about 500 grams per mole. In some embodiments, the small molecule is a salt, ester, or other pharmaceutically acceptable form of such compounds. Small molecules may include, but are not limited to, a neurotransmitter, a hormone, a drug, a toxin, a viral or microbial particle, a synthetic molecule, and an agonist or an antagonist. In some embodiments, the small molecule is a pharmaceutically active agent. In one embodiment, the small molecule is an inhibitor of a metabolic activity or component. Useful classes of pharmaceutically active agents include, but are not limited to, antibiotics, anti-inflammatory drugs, angiogenic or vasoactive agents, growth factors and chemotherapeutic (anti-neoplastic) agents (e.g., tumor suppressors). One or a combination of molecules from the categories and examples described herein or from Orme-Johnson 2007, Methods Cell Biol. 2007; 80:813-26 (incorporated by reference in its entirety) can be used. In one embodiment, the small molecule comprises an antibiotic, anti-inflammatory drug, angiogenic or vasoactive agent, growth factor or chemotherapeutic agent.

[1932] Examples of small molecules that can be used as surface moieties as described herein include, without limitation, those described in, “The Pharmacological Basis of Therapeutics,” Goodman and Gilman, McGraw-Hill, New York, N.Y., (1996), Ninth edition, under the sections: Drugs Acting at Synaptic and Neuroeffector Junctional Sites; Drugs Acting on the Central Nervous System; Autacoids: Drug Therapy of Inflammation; Water, Salts and Ions; Drugs Affecting Renal Function and Electrolyte Metabolism; Cardiovascular Drugs; Drugs Affecting Gastrointestinal Function; Drugs Affecting Uterine Motility; Chemotherapy of Parasitic Infections; Chemotherapy of Microbial Diseases; Chemotherapy of Neoplastic Diseases; Drugs Used for Immunosuppression; Drugs Acting on Blood-Forming organs; Hormones and Hormone Antagonists; Vitamins, Dermatology; and Toxicology, all incorporated herein by reference.

### Vaccines/Antigens

[1933] In some instances, a surface moiety comprises an antigen (e.g., an antigen recognized by the immune system of a subject to be delivered the anellovector or anelloVLP). In some embodiments, a surface moiety comprises a vaccine. In some embodiments, a surface moiety comprises an epitope from a bacterium, virus, fungus, or parasite. In some embodiments, a surface moiety comprises a vaccine for a pathogen (e.g., the surface moiety comprises an antigen of the pathogen). In certain embodiments, the surface moiety comprises one or more vaccine antigens as listed in Table U1 below. In embodiments, the surface moiety comprises one vaccine antigen listed in Table U1. In embodiments, the surface moiety comprises a plurality of distinct vaccine antigens listed in Table U1 (e.g., a plurality of distinct vaccine antigens listed in a single row of Table U1).

TABLE U1
Exemplary vaccine antigens that can be included in a surface
moiety of an anellovector or anello VLP as described herein.

Ascomycota, e.g., Eurotiomycetes, e.g., Eurotiales, e.g., Trichocomaceae, e.g., Aspergillus species antigen (e.g.,
Aspergillus versicolor AVS)
Monodnaviria, e.g., Shotokuvirae, e.g., Cossaviricota, e.g., Papovaviricetes, e.g., Sepolyvirales, e.g., Polyomaviridae,
e.g., Betapolyomavirus, e.g., BK Virus antigen
Proteobacteria, e.g., Betaproteobacteria, e.g., Burkholderiales, e.g., Alcaligenaceae, e.g., Bordetella, e.g., Bordetella
pertussis antigen (e.g., pertussis toxin, filamentous haemagglutinin, pertactin)
Spirochaetes, e.g., Spirochaetales, e.g., Spriochaetaceae, e.g., Borrelia, e.g., Borrelia burgdorferi antigen
Proteobacteria, e.g., Betaproteobacteria, e.g., Burkholderiales, e.g., Burkholderiaceae, e.g., Burkholderia, e.g.,
Burkholderia species antigen (e.g., hydratase/aldolase PhnE)
Riboviria, e.g., Orthornavirae, e.g., Kitrinoviricota, e.g. Alsuviricetes, e.g., Martellivirales, e.g., Togaviridae, e.g.,
Alphavirus, e.g., Chikungunya virus (CHIKV) antigens
Chlamydiae, e.g., Chlamydiales, e.g., Chlamydiaceae, e.g., Chlamydia, e.g., Chlamydia trachomatis antigen
Proteobacteria, e.g., Gammaproteobacteria, e.g., Vibrionales, e.g., Vibrionaceae, e.g., Vibrio, e.g., Vibrio cholerae, e.g.,
Cholera antigen (e.g., cholera toxin B subunit)
“Firmicutes”, e.g., Clostridia, e.g., Clostridiales, e.g., Peptostreptococcaceae, e.g., Clostridioides, e.g., Clostridium, e.g.,
Clostridium difficile antigen
Alveolata, e.g., Apicomplexa, e.g., Conoidasida, e.g., Eucoccidiorida, e.g., Eimeriorina, e.g., Cryoptosporidiidae, e.g.,
Cryptosporidium antigen
Duplodnaviria, e.g., Heunggongvirae, e.g., Peploviricota, e.g., Herviviricetes, e.g., Herpesvirales, e.g., Herpesviridae,
e.g., Betaherpesvirinae, e.g., Cytomegalovirus (CMV) antigen
“Actinobacteria”, e.g., Acintobacteria, e.g., Mycobacteriales, e.g., Corynebacteriaceae, e.g., Corynebacterium,
Diphtheria antigen (e.g., diphtheria toxoid)
Amoebozoa, e.g., Entamoebidae, e.g., Entamoeba, e.g., Entamoeba histolytica antigen
Riboviria, e.g., Orthornavirae, e.g., Pisuviricota, e.g., Pisoniviricetes, e.g., Picornavirales, e.g., Picornaviridae, e.g.,
Enterovirus, e.g., Enterovirus 71 antigen (e.g., VP1)
Duplodnaviria, e.g., Heunggongvirae, e.g., Peploviricota, e.g., Herviviricetes, e.g., Herpesviridae, e.g.,
Lymphocryptovirus, e.g., Epstein-Barr virus antigen
Proteobacteria, e.g., Gammaproteobacteria, e.g., Enterobacterlaes, e.g., Enterobacteriaceae, e.g., Escherichia, e.g.,
Escherichia coli antigen (e.g., bifunctional penicillin-binding protein)
Riboviria, e.g., Orthornavirae, e.g., Kitrinoviricota, e.g., Flasuviricetes, e.g., Amarillovirales, Flaviviridae genus
(Dengue Virus) antigen
Proteobacteria, e.g., Epsilonproteobacteria, e.g., Campylobacterales, e.g., Helicobacteraceae, e.g., Helicobacter, e.g.,
Helicobacter pylori antigen
Hepatitis antigen (e.g., hepatitis A (HAV), e.g., B (HBV), e.g., C (HCV), e.g., D (HDV) e.g., G (HGV) virus antigen)
Duplodnaviria, e.g., Heunggongvirae, e.g., Peploviricota, e.g., Herviviricetes, e.g., Herpesviridae, e.g.,
Alphaherpesvirinae, e.g., Simplexvirus, e.g., Herpes simplex antigen
Varidnaviria, e.g., Bamfordvirae, e.g., Preplasmiviricota, e.g., Tectiliviricetes, e.g., Rowavirales, e.g., Adenoviridae,
e.g., Aviadenovirus, e.g., Ichtadenovirus, e..g, Testadenovirus, e.g., Atadenovirus, e.g., Mastadenovirus, e.g.,
Siadenovirus Human adenovirus antigen (e.g., type 34 hexon protein)
Riboviria, e.g., Pararnavirae, e.g., Artverviricota, e.g., Revtraviricetes, e.g., Ortervirales, e.g., Retroviridae, e.g.,
Orthoretrovirinae, e.g., Lentivirus, e.g., Human immunodeficiency virus (HIV) antigen (e.g., GP-120, GP-160)
Riboviria, e.g., Orthornavirae, e.g., Negarnaviricota, e.g., Monjiviricetes, e.g., Mononegavirales, e.g., Pneumoviridae,
e.g., Metapneumovirus, e.g., Human metapneumovirus antigen
Monodnaviria, e.g., Shotokuvirae, e.g., Cossaviricota, e.g., Papovaviricetes, e.g., Zurhausenvirales, e.g.,
Papillomaviridae, e.g, Alphapapillomavirus, e.g., Betapapillomavirus, e.g., Chipapillomavirus, e.g., Deltapapillovirus,
e.g., Dyochipapillomavirus, e.g., Dyodeltapapillomavirus, e.g., Dyoepsilonpapillomavirus, e.g., Dyoetapapillomavirus,
e.g., Dyoiotapapillomavirus, e.g., Dyokappapapillomavirus, e.g., Dyolambdapapillomavirus, e.g.,
Dyomupapillomavirus, e.g., Dyonupapillomavirus, e.g., Dyoomegapapillomavirus, e.g., Dyoomikronpapillomavirus,
e.g., Dyophipapillomavirus, e.g., Dyopipapillomavirus, e.g., Dyopsipapillomavirus, e.g., Dyorhopapillomavirus, e.g.,
Dyosigmapapillomavirus, e.g., Dyotaupapillomavirus, e.g., Dyothetapapillomavirus, e.g., Dyoupsilonpapillomavirus,
e.g., Dyoxipapillomavirus, e.g., Dyozetapapillomavirus e.g., Gammapapillomavirus, e.g., Iotapapillomavirus, e.g.,
Kappapapillomavirus, e.g., Lambdapapillomavirus, e.g., Mupapillomavirus, e.g., Nupapillomavirus, e.g.,
Omegapapillomavirus, e.., Omikronpapillomavirus, e.g., Phipapillomavirus, e.g., Pipapillomavirus, e.g.,
Psipapillomavirus, e.g., Rhopapillomavirus, e.g., Sigmapapillomavirus, e.g., Taupapillomavirus, e.g.,
Thetapapillomavirus, e.g., Treisdeltapapillomavirus, e.g., Treisepsiolonpapillomavirus, e.g., Treisetapapillomavirus,
e.g., Treisiotapapillomavirus, e.g., Trieskappapapillomavirus, e.g., Treisthetapapillomavirus, e.g.,
Treiszetapapillomavirus, e.g., Upsilonpapillomavirus, e.g., Xipapillomavirus, e.g., Zetapapillomavirus, e.g.,
Alefpapillomavirus, e.g., Human papilloma virus (HPV) antigen (e.g., L1 major capsid protein)
Riboviria, e.g., Orthornavirae, e.g., Negarnaviricota, e.g., Insthoviricetes, e.g., Articulavirales, e.g., Orthomyxoviridae,
e.g., Alphainfluenzavirus, e.g., Betainfluenzavirus, e.g., Gammainfluenzavirus, e.g., Deltainfluenzavirus, e.g., Influenza
virus antigen (e.g., HA)
Monodnaviria, e.g., Shotokuvirae, e.g., Cossaviricota, e.g., Papovaviricetes, e.g., Sepolyvirales, e.g., Polyomaviridae,
e.g., Betapolyomavirus, e.g., JC Virus/JC polyomavirus antigen
Proteobacteria, e.g., gammaproteobacteria, e.g., Enterobacterales, e.g., Klebsiella, e.g., Klebsiella pneumoniae antigen
Riboviria, e.g., Orthornavirae, e.g., Negarnaviricota, e.g., Ellioviricetes, e.g., Bunyavirales, e.g., Arenaviridae, e.g.,
Mammarenavirus, e.g., Lassa virus antigen
Euglenozoa, e.g., Kinetoplastea, e.g., Trypanosomatida, e.g., Leishmania promastigotes antigen
Spriochaetes, e.g., Spirochaetales, e.g., Leptospiraceae, e.g., Leptospira, e.g., Leptospira interrogans antigen
Proteobacteria, e.g., Betaproteobacteria, e.g., Neisseriales, e.g., Neisseriaceae, e.g., Neisseria, e.g., Meningococcal
antigen (e.g., capsular polysaccharides of serogroup A, B, C, Y and W-135)
Actinobacteria, e.g., Corynebacteriales, e.g., Mycobacteriaceae, e.g., Mycobacterium, e.g., Mycobacterium tuberculosis
antigen
Proteobacteria, e.g., etaproteobacteria, e.g., Neisseriales, e.g., Neisseriaceae, e.g., Neisseria, e.g., N.
meningitidis antigen (e.g., type Y polysaccharide [MenY], type W polysaccharide [MenW])
Proteobacteria, e.g., etaproteobacteria, e.g., Neisseriales, e.g., Neisseriaceae, e.g., Neisseria, e.g., Neisseriea gonorrhea
antigen
Apicomplexa, e.g., Aconoidasida, e.g., Haemospororida, e.g., Plasmodiidae, e.g., Plasmodium, e.g., Plasmodium
species antigen (e.g., HRPII, pLDH, pAldo)
“Firmicutes”, e.g., Bacilli, e.g., Lactobacillusoccaceae, e.g., Streptococcus, e.g., Pneumococcal antigen
(e.g., Streptococcus pneumoniae type 3 capsular polysaccharide)
Proteobacteria, e.g., Gammaproteobacteria, e.g., Pseudomonadales, e.g., Pseudomonadaceae, e.g., Pseudomonas, e.g.,
Pseudomonas species antigen (e.g., ferredoxin reductase component)
Riboviria, e.g., Orthornavirae, e.g., Negarnaviricota, e.g., Monjiviricetes, e.g., Mononegavirales, e.g., Rhabdoviridae,
e.g., Lyssavirus, e.g., Rabies antigen
Riboviria, e.g., Orthornavirae, e.g., Negarnaviricota, e.g., Monjiviricetes, e.g., Mononegavirales, e.g., Pneumoviridae,
e.g., Orthopneumovirus, e.g., Respiratory syncytial virus (RSV) antigen
Riboviria, e.g., Orthornavirae, e.g., Negarnaviricota, e.g., Ellioviricetes, e.g., Bunyavirales, e.g., Phenuviridae, e.g.,
Phlebovirus, e.g., Rift Valley fever Virus antigen
Riboviria, e.g., Orthornavirae, e.g., Duplornaviricota, e.g., Resentoviricetes, e.g., Reovirales, e.g., Reoviridae, e.g.,
Sedoreovirinae, e.g., Rotavirus, e.g., Rotavirus antigen (e.g., VP8, H1N1 M2, H7N9 F)
Proteobacteria, e.g., Gammaproteobacteria, e.g., Enterobacterales, e.g., Enterobacteriaceae, e.., Salmonella, e.g.,
Salmonella typhi antigen (e.g., Vi polysaccharide)
Platyhelminthes, e.g., Diplostomida, e.g., Schistosomatidae, e.g., Schistosomatinae, e.g., Schistosoma, e.g.,
Schistosoma species antigen
Proteobacteria, e.g., Gammaproteobacteria, e.g., Enterobacterales, e.g., Enterobacteriaceae, e.g., Shigell, e.g., Shigella
antigen (e.g., shigella polysaccharides)
“Firmicutes”, e.g., Bacilli, e.g., Bacillales, e.g., Staphylococcaceae, e.g., Staphylococcus, e.g., Staphylococcal antigen
(e.g., staphylococcal enterotoxin B)
“Firmicutes”, e.g., Bacilli, e.g., Lactobacillales, e.g., Streptococcaceae, e.g., Streptococcus, e.g., Streptococcus
agalactiae antigen
“Firmicutes”, e.g., Bacilli, e.g., Lactobacillales, e.g., Streptococcaceae, e.g., Streptococcus, e.g., Streptococcus
pyogenes antigen
“Firmicutes”, e.g., Clostridia, e.g., Clostridiales, e.g., Clostridiaceae, e.g., Clostridium, e.g., Tetanus antigen (e.g.,
tetanus toxoid)
Riboviria, e.g., Orthornavirae, e.g., Kitrinoviricota, e.g., Flasuviricetes, e.g., Amarillovirales, e.g., Flaviviridae, e.g.,
Flavivirus, e.g., Tick-borne encephalitis (TBE) antigen
Apicomplexa, e.g., Conoidasida, e.g., Eucoccidiorida, e.g., Sarcocystidae, e.g., Toxoplasmatinae, e.g., Toxoplasma,
e.g., Toxoplasma gondii antigen
Spirochaetes, e.g., Spirochaetales, e.g., Spirochaetaceae, e.g., Treponema, e.g., Treponema pallidum antigen
“Actinobacteria”, e.g., Actinobacteria, e.g., Mycobacteriales, e.g., Mycobacteriaceae, e.g., Mycobacterium, e.g.,
Tuberculosis antigen
Riboviria, e.g., Orthornavirae, e.g., Negarnaviricota, e.g., Monjiviricetes, e.g., Mononegavirales, e.g., Rhabdoviridae,
e.g., Vesiculovirus, e.g., Vesicular stomatitis virus antigen (e.g., vesicular stomatitis virus glycoprotein)
Proteobacteria, e.g., Gammaproteobacteria, e.g., Vibrionales, e.g., Vibrionaceae, e.g., Vibrio, e.g., Vibrio cholerae
antigen
Riboviria, e.g., Orthornavirae, e.g., Kitrinoviricota, e.g., Flasuviricetes, e.g., Amarillovirales, e.g., Flaviviridae, e.g.,
Flavivirus, e.g., West Nile virus (WNV) antigen
Riboviria, e.g., Orthornavirae, e.g., Kitrinoviricota, e.g., Flasuviricetes, e.g., Amarillovirales, e.g., Flaviviridae, e.g.,
Flavivirus, e.g., Zika virus antigen
Apicomplexa, e.g., Aconoidasida, e.g., Haemospororida, e.g., Plasmodiidae, e.g., Plasmodium, e.g., Plasmodium vivax,
Plasmodium falciparum, Plasmodium malariae, Plasmodium ovale, or Plasmodium knowlesi.
Riboviria, e.g., Orthornavirae, e.g., Pisuviricota, e.g., Pisoniviricetes, e.g., Nidovirales, e.g., Coronaviridae, e.g.,
Betacoronavirus, e.g., Sebacovirus, e.g., severe acute respiratory syndrome-related coronavirus, e.g., SARS-CoV-2,
e.g., SARS-CoV-2 alpha variant, SARS-CoV-2 beta variant, SARS-CoV-2 gamma variant, SARS-CoV-2 delta variant,
or SARS-CoV-2 omicron variant

[1934] In some embodiments, a vaccine comprising an anellovector or anelloVLP as described herein is administered with an adjuvant. In certain embodiments, the adjuvant is an inorganic adjuvant (e.g., potassium alum, aluminium hydroxide, aluminium phosphate, or calcium phosphate hydroxide). In certain embodiments, the adjuvant is an oil-based adjuvant (e.g., paraffin oil). In certain embodiments, the adjuvant is a saponin. In certain embodiments, the adjuvant is a cytokine. In certain embodiments, the adjuvant is a squalene. In certain embodiments, the adjuvant is Freund's complete adjuvant.

[1935] In some embodiments, a vaccine as described herein is administered in a dose comprising about 10¹⁰ to 10¹⁴ viral genome equivalents of an anellovector as described herein. In some embodiments, a vaccine as described herein is administered as a dose comprising about 10¹⁰ to 10¹⁴ particles (e.g., anellovectors or anelloVLPs) as described herein.

### Ligands

[1936] In some instances, a surface moiety as described herein comprises a ligand (e.g., a ligand that binds specifically to a receptor on a target cell). In some embodiments, the ligand is a growth factor. In certain embodiments, the ligand binds to a growth factor receptor on the surface of the target cell. In some embodiments, the ligand is a cytokine. In some embodiments, the ligand is a hormone.

### II. Compositions and Methods for Making Anellovectors and AnelloVLPs

[1937] The present disclosure provides, in some aspects, anellovectors, anelloVLPs, and methods thereof for delivering effectors. In some embodiments, the anellovectors, anelloVLPs, or components thereof can be made as described below. In some embodiments, the compositions and methods described herein can be used to produce a genetic element or a genetic element construct. In some embodiments, the compositions and methods described herein can be used to produce one or more Anellovirus ORF molecules (e.g., an ORF1, ORF2, ORF2/2, ORF2/3, ORF1/1, or ORF1/2 molecule, or a functional fragment or splice variant thereof). In some embodiments, the compositions and methods described herein can be used to produce a proteinaceous exterior or a component thereof (e.g., an ORF1 molecule), e.g., in a host cell. In some embodiments, the anellovectors, anelloVLPs, or components thereof can be made using a tandem construct, e.g., as described in PCT Publication No. WO 2021252955, which is incorporated herein by reference in its entirety. The present disclosure provides, in some aspects, compositions (e.g., bacmids, donor vectors, baculovirus particles, and cells comprising same) and methods that can be used for producing anellovectors or anelloVLPs, e.g., as described herein. In some embodiments, the compositions and methods described herein can be used to produce a genetic element or a genetic element construct. In some embodiments, the compositions and methods described herein can be used to produce one or more Anellovirus ORF molecules (e.g., an ORF1, ORF2, ORF2/2, ORF2/3, ORF1/1, or ORF1/2 molecule, or a functional fragment or splice variant thereof). In some embodiments, the compositions and methods described herein can be used to produce a proteinaceous exterior or a component thereof (e.g., an ORF1 molecule). In some embodiments, the anellovectors, anelloVLPs, or components thereof can be made using a bacmid/insect cell system, e.g., as described as described in PCT Publication No. WO 2021/252943, which is incorporated herein by reference in its entirety. Methods of producing an anellovector using a host cell are described, for example, below in the section entitled “Host Cells.” Method of producing an anellovector in a cell-free system are described, for example, below in the section entitled “In vitro assembly methods”.

[1938] Without wishing to be bound by theory, rolling circle amplification may occur via Rep protein binding to a Rep binding site (e.g., comprising a 5′ UTR, e.g., comprising a hairpin loop and/or an origin of replication, e.g., as described herein) positioned 5′ relative to (or within the 5′ region of) the genetic element region. The Rep protein may then proceed through the genetic element region, resulting in the synthesis of the genetic element. The genetic element may then be circularized and then enclosed within a proteinaceous exterior to form an Anelloviridae family vector (e.g., anellovector).

### Components and Assembly of Anellovectors and AnelloVLPs

[1939] The compositions and methods herein can be used to produce anellovectors and anelloVLPs. As described herein, an anellovector generally comprises a genetic element (e.g., a single-stranded, circular DNA molecule, e.g., comprising a 5′ UTR region as described herein) enclosed within a proteinaceous exterior (e.g., comprising a polypeptide encoded by an Anellovirus ORF1 nucleic acid, e.g., as described herein). In some embodiments, the genetic element comprises one or more sequences encoding Anellovirus ORFs (e.g., one or more of an Anellovirus ORF1, ORF2, ORF2/2, ORF2/3, ORF1/1, or ORF1/2). As described herein, an anelloVLP generally comprises a proteinaceous exterior (e.g., comprising a polypeptide encoded by an Anellovirus ORF1 nucleic acid, e.g., as described herein) and an exogenous effector. As used herein, an Anellovirus ORF or ORF molecule (e.g., an Anellovirus ORF1, ORF2, ORF2/2, ORF2/3, ORF1/1, or ORF1/2) includes a polypeptide comprising an amino acid sequence having at least 70%, 75%, 80%, 85%, 90%, 95%, 96%, 97%, 98%, 99%, or 100% sequence identity to a corresponding Anellovirus ORF sequence, e.g., as described herein or as described in PCT/US2018/037379 or PCT/US19/65995 (each of which is incorporated by reference herein in their entirety). In embodiments, the genetic element comprises a sequence encoding an Anellovirus ORF1, or a splice variant or functional fragment thereof (e.g., a structural jelly-roll region, e.g., as described herein). In some embodiments, the proteinaceous exterior comprises a polypeptide encoded by an Anellovirus ORF1 nucleic acid (e.g., an Anellovirus ORF1 molecule or a splice variant or functional fragment thereof).

[1940] In some embodiments, an anellovector is assembled by enclosing a genetic element (e.g., as described herein) within a proteinaceous exterior (e.g., as described herein). In some embodiments, an anellovector is assembled by enclosing a genetic element (e.g., as described herein) within a proteinaceous exterior in vitro (e.g., as described herein) (e.g., wherein the enclosing occurs external to a host cell, e.g., in the absence of a host cell). In some embodiments, the genetic element is enclosed within the proteinaceous exterior in a host cell (e.g., as described herein). In some embodiments, a surface moiety is attached to the proteinaceous exterior (e.g., as described herein). In some embodiments, the proteinaceous exterior comprises an ORF1 molecule comprising a surface moiety (e.g., as described herein). In certain embodiments, the ORF1 molecule comprises a surface moiety fused to an ORF1 domain.

[1941] In some embodiments, an anelloVLP is assembled by enclosing an exogenous effector within a proteinaceous exterior (e.g., as described herein) in vitro (e.g., wherein the enclosing occurs external to a host cell, e.g., in the absence of a host cell). In some embodiments, an anelloVLP is assembled by contacting a plurality of ORF1 molecules (e.g., as described herein) with an effector in vitro (e.g., wherein the contacting occurs external to a host cell, e.g., in the absence of a host cell). In some embodiments, an anelloVLP is assembled by attaching an exogenous effector to the exterior surface of a proteinaceous exterior (e.g., as described herein) in vitro. In some embodiments, a surface moiety is attached to the proteinaceous exterior (e.g., as described herein). In some embodiments, the proteinaceous exterior comprises an ORF1 molecule comprising a surface moiety (e.g., as described herein). In certain embodiments, the ORF1 molecule comprises a surface moiety fused to an ORF1 domain.

[1942] In some embodiments, a host cell expresses one or more polypeptides comprised in the proteinaceous exterior (e.g., a polypeptide encoded by an Anellovirus ORF1 nucleic acid, e.g., an ORF1 molecule). For example, in some embodiments, the host cell comprises a nucleic acid sequence encoding an Anellovirus ORF1 molecule, e.g., a splice variant or a functional fragment of an Anellovirus ORF1 polypeptide (e.g., a wild-type Anellovirus ORF1 protein or a polypeptide encoded by a wild-type Anellovirus ORF1 nucleic acid, e.g., as described herein). In embodiments, the nucleic acid sequence encoding the Anellovirus ORF1 molecule is comprised in a nucleic acid construct (e.g., a plasmid, viral vector, virus, minicircle, bacmid, or artificial chromosome) comprised in the host cell. In embodiments, the nucleic acid sequence encoding the Anellovirus ORF1 molecule is integrated into the genome of the host cell.

[1943] In some embodiments, a host cell produces a genetic element from a nucleic acid construct comprising the sequence of the genetic element. In some embodiments, the nucleic acid construct is selected from a plasmid, in vitro circularized nucleic acid molecule, viral nucleic acid molecule, minicircle, bacmid, or artificial chromosome. In some embodiments, the genetic element is excised from the nucleic acid construct and, optionally, converted from a double-stranded form to a single-stranded form (e.g., by denaturation). In some embodiments, the genetic element is generated by a polymerase based on a template sequence in the nucleic acid construct. In some embodiments, the polymerase produces a single-stranded copy of the genetic element sequence, which can optionally be circularized to form a genetic element as described herein. In other embodiments, the nucleic acid construct is a double-stranded minicircle produced by circularizing the nucleic acid sequence of the genetic element in vitro. In embodiments, the in vitro-circularized (IVC) minicircle is introduced into the host cell, where it is converted to a single-stranded genetic element suitable for enclosure in a proteinaceous exterior, as described herein.

[1944] In some embodiments, the host cell comprises a genetic element construct (e.g., a bacmid, plasmid, or minicircle). In some embodiments, the host cell comprises a bacmid comprising one or more sequences encoding Anellovirus ORF molecules (e.g., ORF1, ORF2, ORF2/2, ORF2/3, ORF1/1, and/or ORF1/2 ORF molecules), or functional fragments thereof. In some embodiments, proteinaceous exterior proteins are expressed from the bacmid. In embodiments, the proteinaceous exterior proteins expressed from the bacmid enclose a genetic element, thereby forming an anellovector. In some embodiments, the bacmid comprises a backbone suitable for replication of the nucleic acid construct in insect cells (e.g., Sf9 cells), e.g., a baculovirus backbone region. In some embodiments, the bacmid comprises a backbone region suitable for replication of the genetic element construct in bacterial cells (e.g., E. coli cells, e.g., DH 10Bac cells). In some embodiments, the genetic element construct comprises a backbone suitable for replication of the nucleic acid construct in insect cells (e.g., Sf9 cells), e.g., a baculovirus backbone region. In some embodiments, the genetic element construct comprises a backbone region suitable for replication of the genetic element construct in bacterial cells (e.g., E. coli cells, e.g., DH 10Bac cells). In some embodiments, the bacmid is introduced into the host cell via a baculovirus particle. In embodiments, the bacmid is produced by a producer cell, e.g., an insect cell (e.g., an Sf9 cell) or a bacterial cell (e.g., an E. coli cell, e.g., a DH 10Bac cell). In embodiments, the producer cell comprises a bacmid and/or a donor vector, e.g., as described herein. In embodiments, the producer cell further comprises sufficient cellular machinery for replication of the bacmid and/or donor vector.

### ORF1 Molecules, e.g., for Assembly of Anellovectors

[1945] An anellovector or anelloVLP as described herein generally comprises a proteinaceous exterior comprising a polypeptide encoded by an Anellovirus ORF1 nucleic acid (e.g., an Anellovirus ORF1 molecule or a splice variant or functional fragment thereof, e.g., as described herein). An ORF1 molecule may, in some embodiments, comprise one or more of: a first region comprising a structural arginine rich region, e.g., a region having at least 60% basic residues (e.g., at least 60%, 65%, 70%, 75%, 80%, 85%, 90%, 95%, or 100% basic residues; e.g., between 60%-90%, 60%-80%, 70%-90%, or 70-80% basic residues), and a second region comprising structural jelly-roll domain, e.g., at least six beta strands (e.g., 4, 5, 6, 7, 8, 9, 10, 11, or 12 beta strands). In embodiments, the proteinaceous exterior comprises one or more (e.g., 1, 2, 3, 4, or all 5) of an Anellovirus ORF1 structural arginine-rich region, structural jelly-roll region, structural N22 domain, hypervariable region, and/or structural C-terminal domain. In some embodiments, the proteinaceous exterior comprises an Anellovirus ORF1 structural jelly-roll region (e.g., as described herein). In some embodiments, the proteinaceous exterior comprises an Anellovirus ORF1 structural arginine-rich region (e.g., as described herein). In some embodiments, the proteinaceous exterior comprises an Anellovirus ORF1 structural N22 domain (e.g., as described herein). In some embodiments, the proteinaceous exterior comprises an Anellovirus hypervariable region (e.g., as described herein). In some embodiments, the proteinaceous exterior comprises an Anellovirus ORF1 structural C-terminal domain (e.g., as described herein).

[1946] In some embodiments, the anellovector comprises an ORF1 molecule and/or a nucleic acid encoding an ORF1 molecule. In some embodiments, the anelloVLP comprises an ORF1 molecule. Generally, an ORF1 molecule comprises a polypeptide having the structural features and/or activity of an Anellovirus ORF1 protein (e.g., an Anellovirus ORF1 protein as described herein), or a functional fragment thereof. In some embodiments, the ORF1 molecule comprises a truncation relative to an Anellovirus ORF1 protein (e.g., an Anellovirus ORF1 protein as described herein). In some embodiments, the ORF1 molecule is truncated by at least 10, 20, 30, 40, 50, 60, 70, 80, 90, 100, 150, 200, 250, 300, 350, 400, 450, 500, 550, 600, 650, or 700 amino acids of the Anellovirus ORF1 protein. In some embodiments, an ORF1 molecule comprises an amino acid sequence having at least 75%, 80%, 85%, 90%, 95%, 96%, 97%, 98%, or 99% sequence identity to a Betatorquevirus ORF1 protein, e.g., as described herein. An ORF1 molecule can generally bind to a nucleic acid molecule, such as DNA (e.g., a genetic element, e.g., as described herein). In some embodiments, an ORF1 molecule localizes to the nucleus of a cell. In certain embodiments, an ORF1 molecule localizes to the nucleolus of a cell.

[1947] Without wishing to be bound by theory, an ORF1 molecule may be capable of binding to other ORF1 molecules, e.g., to form a proteinaceous exterior (e.g., as described herein). Such an ORF1 molecule may be described as having the capacity to form a capsid. In some embodiments, the proteinaceous exterior may enclose a nucleic acid molecule (e.g., a genetic element as described herein, e.g., produced using a composition or construct as described herein) and/or an effector (e.g., an exogenous effector). In some embodiments, a plurality of ORF1 molecules may form a multimer, e.g., to produce a proteinaceous exterior. In some embodiments, the multimer may be a homomultimer. In other embodiments, the multimer may be a heteromultimer.

[1948] In some embodiments, a first plurality of anellovectors or anelloVLPs comprising an ORF1 molecule as described herein is administered to a subject. In some embodiments, a second plurality of anellovectors or anelloVLPs comprising an ORF1 molecule described herein, is subsequently administered to the subject following administration of the first plurality. In some embodiments the second plurality of anellovectors or anelloVLPs comprises an ORF1 molecule having the same amino acid sequence as the ORF1 molecule comprised by the anellovectors or anelloVLPs of the first plurality. In some embodiments the second plurality of anellovectors or anelloVLPs comprises an ORF1 molecule having at least 70%, 75%, 80%, 85%, 90%, 95%, 96%, 97%, 98%, 99%, or 100% amino acid sequence identity to the ORF1 molecule comprised by the anellovectors or anelloVLPs of the first plurality.

### ORF2 Molecules, e.g., for Assembly of Anellovectors

[1949] Producing an anellovector or anelloVLP using the compositions or methods described herein may involve expression of an Anellovirus ORF2 molecule (e.g., as described herein), or a splice variant or functional fragment thereof. In some embodiments, the anellovector comprises an ORF2 molecule, or a splice variant or functional fragment thereof, and/or a nucleic acid encoding an ORF2 molecule, or a splice variant or functional fragment thereof. In some embodiments, the anellovector or anelloVLP does not comprise an ORF2 molecule, or a splice variant or functional fragment thereof, and/or a nucleic acid encoding an ORF2 molecule, or a splice variant or functional fragment thereof. In some embodiments, producing the anellovector or anelloVLP comprises expression of an ORF2 molecule, or a splice variant or functional fragment thereof, but the ORF2 molecule is not incorporated into the anellovector or anelloVLP. In some embodiments, producing the anellovector or anelloVLP comprises expression of an ORF2 molecule, or a splice variant or functional fragment thereof, but the ORF2 molecule is expressed from a nucleic acid other than Anelloviridae family vector.

### Production of Protein Components

[1950] Protein components of an anellovector or anelloVLP, e.g., ORF1, can be produced in a variety of ways, e.g., as described herein. In some embodiments, one or more protein components of an anellovector or anelloVLP, including, e.g., the proteinaceous exterior, are produced in a host cell (e.g., the same host cell that packages the genetic elements into the proteinaceous exteriors, thereby producing the anellovectors). In some embodiments, one or more protein components of an anellovector or anelloVLP, including, e.g., the proteinaceous exterior, are produced in a cell that does not comprise a genetic element and/or a genetic element construct (e.g., as described herein). In some embodiments, one or more protein components of an anellovector or anelloVLP are produced and then secreted from a host cell. In some embodiments, one or more protein components of an anellovector or anelloVLP are produced and then isolated from a host cell (e.g., by lysing the host cell).

### Baculovirus Expression Systems

[1951] A viral expression system, e.g., a baculovirus expression system, may be used to express proteins (e.g., for production of anellovectors or anelloVLPs), e.g., as described herein. Baculoviruses are rod-shaped viruses with a circular, supercoiled double-stranded DNA genome. Genera of baculoviruses include: Alphabaculovirus (nucleopolyhedroviruses (NPVs) isolated from Lepidoptera), Betabaculoviruses (granuloviruses (GV) isolated from Lepidoptera), Gammabaculoviruses (NPVs isolated from Hymenoptera) and Deltabaculoviruses (NPVs isolated from Diptera). While GVs typically contain only one nucleocapsid per envelope, NPVs typically contain either single (SNPV) or multiple (MNPV) nucleocapsids per envelope. The enveloped virions are further occluded in granulin matrix in GVs and polyhedrin in NPVs. Baculoviruses typically have both lytic and occluded life cycles. In some embodiments, the lytic and occluded life cycles manifest independently throughout the three phases of virus replication: early, late, and very late phase. In some embodiments, during the early phase, viral DNA replication takes place following viral entry into the host cell, early viral gene expression and shut-off of the host gene expression machinery. In some embodiments, in the late phase late genes that code for viral DNA replication are expressed, viral particles are assembled, and extracellular virus (EV) is produced by the host cell. In some embodiments, in the very late phase the polyhedrin and p10 genes are expressed, occluded viruses (OV) are produced by the host cell, and the host cell is lysed. Since baculoviruses infect insect species, they can be used as biological agents to produce exogenous proteins in baculoviruses-permissive insect cells or larvae. Different isolates of baculovirus, such as Autographa californica multiple nuclear polyhedrosis virus (AcMNPV) and Bombyx mori (silkworm) nuclear polyhedrosis virus (BmNPV) may be used in exogenous protein expression. Various baculoviral expression systems are commercially available, e.g., from ThermoFisher.

[1952] In some embodiments, the proteins described herein (e.g., an Anellovirus ORF molecule, e.g., ORF1, ORF2, ORF2/2, ORF2/3, ORF1/1, or ORF1/2, or a functional fragment or splice variant thereof) may be expressed using a baculovirus expression vector (e.g., a bacmid) that comprises one or more components described herein. For example, a baculovirus expression vector may include one or more of (e.g., all of) a selectable marker (e.g., kanR), an origin of replication (e.g., one or both of a bacterial origin of replication and an insect cell origin of replication), a recombinase recognition site (e.g., an att site), and a promoter. In some embodiments, a baculovirus expression vector (e.g., a bacmid as described herein) can be produced by replacing the naturally occurring wild-type polyhedrin gene, which encodes for baculovirus occlusion bodies, with genes encoding the proteins described herein. In some embodiments, the genes encoding the proteins described herein are cloned into a baculovirus expression vector (e.g., a bacmid as described herein) containing a baculovirus promoter. In some embodiments, the baculovirual vector comprises one or more non-baculoviral promoters, e.g., a mammalian promoter or an Anellovirus promoter. In some embodiments, the genes encoding the proteins described herein are cloned into a donor vector (e.g., as described herein), which is then contacted with an empty baculovirus expression vector (e.g., an empty bacmid) such that the genes encoding the proteins described herein are transferred (e.g., by homologous recombination or transposase activity) from the donor vector into the baculovirus expression vector (e.g., bacmid). In some embodiments, the baculovirus promoter is flanked by baculovirus DNA from the nonessential polyhedrin gene locus. In some embodiments, a protein described herein is under the transcriptional control of the AcNPV polyhedrin promoter in the very late phase of viral replication. In some embodiments, a strong promoter suitable for use in baculoviral expression in insect cells include, but are not limited to, baculovirus p10 promoters, polyhedrin (polh) promoters, p6.9 promoters and capsid protein promoters. Weak promoters suitable for use in baculoviral expression in insect cells include ie1, ie2, ie0, etI, 39K (aka pp31) and gp64 promoters of baculoviruses.

[1953] In some embodiments, a recombinant baculovirus is produced by homologous recombination between a baculoviral genome (e.g., a wild-type or mutant baculoviral genome), and a transfer vector. In some embodiments, one or more genes encoding a protein described herein are cloned into the transfer vector. In some embodiments, the transfer vector further contains a baculovirus promoter flanked by DNA from a nonessential gene locus, e.g., polyhedrin gene. In some embodiments, one or more genes encoding a protein described herein are inserted into the baculoviral genome by homologous recombination between the baculoviral genome and the transfer vector. In some embodiments, the baculoviral genome is linearized at one or more unique sites. In some embodiments, the linearized sites are located near the target site for insertion of genes encoding the proteins described herein into the baculoviral genome. In some embodiments, a linearized baculoviral genome missing a fragment of the baculoviral genome downstream from a gene, e.g., polyhedrin gene, can be used for homologous recombination. In some embodiments, the baculoviral genome and transfer vector are co-transfected into insect cells. In some embodiments, the method of producing the recombinant baculovirus comprises the steps of preparing the baculoviral genome for performing homologous recombination with a transfer vector containing the genes encoding one or more protein described herein and co-transfecting the transfer vector and the baculoviral genome DNA into insect cells. In some embodiments, the baculoviral genome comprises a region homologous to a region of the transfer vector. These homologous regions may enhance the probability of recombination between the baculoviral genome and the transfer vector. In some embodiments, the homology region in the transfer vector is located upstream or downstream of the promoter. In some embodiments, to induce homologous recombination, the baculoviral genome, and transfer vector are mixed at a weight ratio of about 1:1 to 10:1.

[1954] In some embodiments, a recombinant baculovirus is generated by a method comprising site-specific transposition with Tn7, e.g., whereby the genes encoding the proteins described herein are inserted into bacmid DNA, e.g., propagated in bacteria, e.g., E. coli (e.g., DH 10Bac cells). In some embodiments, the genes encoding the proteins described herein are cloned into a pFASTBAC® vector and transformed into competent cells, e.g., DH10BAC® competent cells, containing the bacmid DNA with a mini-attTn7 target site. In some embodiments, the baculovirus expression vector, e.g., pFASTBAC® vector, may have a promoter, e.g., a dual promoter (e.g., polyhedrin promoter, p10 promoter). Commercially available pFASTBAC® donor plasmids include: pFASTBAC 1, pFASTBAC HT, and pFASTBAC DUAL. In some embodiments, recombinant bacmid DNA containing-colonies are identified and bacmid DNA is isolated to transfect insect cells.

[1955] In some embodiments, a baculoviral vector is introduced into an insect cell together with a helper nucleic acid. The introduction may be concurrent or sequential. In some embodiments, the helper nucleic acid provides one or more baculoviral proteins, e.g., to promote packaging of the baculoviral vector. In some embodiments, recombinant baculovirus produced in insect cells (e.g., by homologous recombination) is expanded and used to infect insect cells (e.g., in the mid-logarithmic growth phase) for recombinant protein expression. In some embodiments, recombinant bacmid DNA produced by site-specific transposition in bacteria, e.g., E. coli, is used to transfect insect cells with a transfection agent, e.g., Cellfectin® II. Additional information on baculovirus expression systems is discussed in U.S. patent application Ser. Nos. 14/447,341, 14/277,892, and 12/278,916, which are hereby incorporated by reference.

[1956] Exemplary baculoviral vectors, as well as compositions and methods relating thereto (e.g., for producing proteins from Anelloviridae family viruses) are described in PCT Publication No. WO/2021/252943, which is incorporated herein by reference in its entirety.

### Insect Cell Systems

[1957] The proteins described herein may be expressed in host cells (e.g., insect cells) infected or transfected with recombinant baculovirus or bacmid DNA, e.g., as described above. In some embodiments, the host or host cell is an insect cell (e.g., an Sf9 cell, Sf21 cell, or Hi5 cell). In some embodiments, the insect cell is derived from Bombyx mori, Mamestra brassicae, Spodopterafrugiperda, Trichoplusia ni, or Drosophila melanogaster. In some embodiments, the insect cell is selected from Sf9 and Sf21 cells derived from Spodopterafrugiperda and Tn-368 and High Five™ BTI-TN-5B1-4 cells (also referred to as Hi5 cells) derived from Trichoplusia ni. In some embodiments, insect cell lines Sf21 and Sf9, derived from the ovaries of the pupal fall army worm Spodopterafrugiperda, can be used for the expression of recombinant proteins using the baculovirus expression system. In some embodiments, Sf21 and Sf9 insect cells may be cultured in commercially available serum-supplemented or serum-free media. Suitable media for culturing insect cells include: Grace's Supplemented (TNM-FH), IPL-41, TC-100, Schneider's Drosophila, SF-900 II SFM, and EXPRESS-FIVE™ SFM. In some embodiments, some serum-free media formulations utilize a phosphate buffer system to maintain a culture pH in the range of 6.0-6.4 (Licari et al. Insect cell hosts for baculovirus expression vectors contain endogenous exoglycosidase activity. Biotechnology Progress 9: 146-152 (1993) and Drugmand et al. Insect cells as factories for biomanufacturing. Biotechnology Advances 30:1140-1157 (2012)) for both cultivation and recombinant protein production. In some embodiments, a pH of 6.0-6.8 for cultivating various insect cell lines may be used. In some embodiments, insect cells are cultivated in suspension or as a monolayer at a temperature between 25° to 30° C. with aeration. Additional information on insect cells is discussed, for example, in U.S. patent application Ser. Nos. 14/564,512 and 14/775,154, each of which is hereby incorporated by reference.

[1958] Exemplary insect cells, as well as compositions and uses relating to same (e.g., for producing proteins from Anelloviridae family viruses), are described in PCT Publication No. WO/2021/252943, which is incorporated herein by reference in its entirety.

### Mammalian Cell Systems

[1959] In some embodiments, the proteins described herein may be expressed in vitro in animal cell lines infected or transfected with a vector encoding the protein, e.g., as described herein. Animal cell lines envisaged in the context of the present disclosure include porcine cell lines, e.g., immortalised porcine cell lines such as, but not limited to the porcine kidney epithelial cell lines PK-15 and SK, the monomyeloid cell line 3D4/31 and the testicular cell line ST. Also, other mammalian cells lines are included, such as CHO cells (Chinese hamster ovaries), MARC-145, MDBK, RK-13, EEL. Additionally or alternatively, particular embodiments of the methods of the invention make use of an animal cell line which is an epithelial cell line, i.e. a cell line of cells of epithelial lineage. Cell lines suitable for expressing the proteins described herein include, but are not limited to cell lines of human or primate origin, such as human or primate kidney carcinoma cell lines.

### Recombinase-Based Production of Genetic Elements and Anelloviridae Family Vectors

[1960] A genetic element for an Anelloviridae family vector (e.g., an anellovector) may be produced via site-specific recombination of a genetic element construct to produce a circular nucleic acid molecule comprising the genetic element sequence. In some embodiments, the circular nucleic acid molecule is a double-stranded DNA minicircle. In some embodiments, the circular nucleic acid molecule is in turn converted to a circular single-stranded DNA molecule, which can in turn serve as the genetic element of an Anelloviridae family vector (e.g., an anellovector) as described herein. Generally, the genetic element construct comprises a set of recombinase recognition sequences flanking the sequence of a genetic element of an Anelloviridae family vector. The recombinase recognition sites may be recognized by a site-specific recombinase. The remainder of the genetic element construct may, in some instances, comprise a vector backbone comprising elements for replication of the construct in a cell, such as a mammalian cell or a bacterial cell.

[1961] Contacting the genetic element construct with the site-specific recombinase (e.g., in a host cell) may result in excision of the genetic element sequence from the remainder of the construct and the formation of two circular nucleic acid molecules, one comprising the genetic element sequence and the other comprising the remainder of the vector backbone. In some embodiments, the circular nucleic acid molecule (e.g., a minicircle) comprising the genetic element sequence is converted to cssDNA in the host cell (e.g., a mammalian host cell), and is then encapsulated in a proteinaceous exterior comprising ORF1 molecules or VP1 molecules (e.g., as described herein) to produce an Anelloviridae family vector. In other embodiments, the circular nucleic acid molecule (e.g., a minicircle) comprising the genetic element sequence is isolated from the host cell (e.g., a bacterial host cell). The isolated minicircles are then converted to cssDNA, and can then be encapsulated (e.g., in an in vitro setting, such as a cell-free solution) within a proteinaceous exterior comprising ORF1 molecules or VP1 molecules (e.g., as described herein) to produce an Anelloviridae family vector.

### Three-Plasmid Systems

[1962] In some embodiments, a site specific recombinase-based system for producing genetic elements comprises three plasmids: (1) a first plasmid (e.g., a vector plasmid) comprising the sequence of the genetic element, flanked by a pair of recombinase recognition sites; (2) an expression plasmid comprising a cassette encoding a site-specific recombinase (e.g., as described herein) capable of recognizing the recombinase recognition sites; and (3) a plasmid (e.g., a self-replicating rescue (SRR) plasmid) providing one or more Anelloviridae family viral proteins (e.g., Anellovirus ORF1, ORF3, and/or ORF3 molecules; or CAV VP1, VP2, and/or VP3 molecules), including a capsid protein (e.g., an ORF1 molecule or VP1 molecule, e.g., as described herein). A host cell may comprise all three plasmids. Expression of the site-specific recombinase from the expression plasmid enables recombination of the first plasmid to produce minicircles comprising the genetic element sequence (which may, in some instances, be converted to cssDNA in the cell). Capsid proteins (e.g., ORF1 molecules or VP1 molecules) can be expressed from the SRR plasmid, and can then form proteinaceous exteriors (e.g., as described herein) encapsulating the genetic elements (e.g., after conversion to cssDNA), thereby producing Anelloviridae family vector particles. In some embodiments, expression of an ORF2 or ORF3 molecule, or a VP2 or VP3 molecule, from the SRR plasmid contributes to replication and/or packaging. In some embodiments, the ORF1 molecule encoded by one of the plasmids comprises a deletion relative to a wild-type Anellovirus ORF1 protein (e.g., a deletion of all or part of an Anellovirus ORF1 structural arginine-rich region and/or structural C-terminal domain (CTD), e.g., as described herein).

[1963] In some embodiments, the portion of the first plasmid flanked by recombination recognition sites comprises, in order: (i) a 5′ NCR of an Anelloviridae family virus (e.g., Ring2, Ring19, Ring20, or CAV), or a nucleic acid sequence having at least 75%, 80%, 85%, 90%, 95%, 96%, 97%, 98%, or 99% identity thereto; (ii) a nucleic acid sequence encoding a transgene of interest; and (iii) a 3′ NCR of an Anelloviridae family virus (e.g., Ring2, Ring19, Ring20, or CAV), or a nucleic acid sequence having at least 75%, 80%, 85%, 90%, 95%, 96%, 97%, 98%, or 99% identity thereto.

[1964] In some embodiments, the portion of the first plasmid flanked by recombination recognition sites comprises, in order: (i) a 3′ NCR of an Anelloviridae family virus (e.g., Ring2, Ring19, Ring20, or CAV), or a nucleic acid sequence having at least 75%, 80%, 85%, 90%, 95%, 96%, 97%, 98%, or 99% identity thereto; (ii) a 5′ NCR of an Anelloviridae family virus (e.g., Ring2, Ring19, Ring20, or CAV), or a nucleic acid sequence having at least 75%, 80%, 85%, 90%, 95%, 96%, 97%, 98%, or 99% identity thereto; and (iii) a nucleic acid sequence encoding a transgene of interest.

[1965] Non-limiting examples of plasmids suitable for use in a three-plasmid recombinase system as described herein are provided in Tables Z1-Z10 below. Tables Z1-Z5 provide exemplary first plasmid and expression plasmid sequences for use in a three-plasmid system utilizing Cre recombinase to recombine a vector plasmid comprising loxP sites flanking the genetic element sequence. In some embodiments, the SRR plasmid comprises the sequence of an exemplary plasmid as described in the SRR constructs section below. Tables Z6-Z10 provide exemplary first plasmid and expression plasmid sequences for use in a three-plasmid system utilizing Bxb1 recombinase to recombine a vector plasmid comprising attB and attP sites flanking the genetic element sequence.

[1966] In some embodiments, a vector plasmid (e.g., suitable for use in a three-plasmid system as described herein) comprises the nucleic acid sequence of a vector plasmid as listed in any of Tables Z1 or Z2 (or an element or subsequence thereof as described in the respective table), or a nucleic acid sequence having at least 75%, 80%, 85%, 90%, 95%, 96%, 97%, 98%, or 99% identity thereto. In some embodiments, a recombined vector plasmid (e.g., a minicircle as described herein) comprises the nucleic acid sequence of a vector plasmid as listed in any of Tables Z3 or Z4 (or an element or subsequence thereof as described in the respective table), or a nucleic acid sequence having at least 75%, 80%, 85%, 90%, 95%, 96%, 97%, 98%, or 99% identity thereto. In some embodiments, a recombinase expression plasmid (e.g., suitable for use in a three-plasmid system as described herein) comprises the nucleic acid sequence of a vector plasmid as listed in Table Z5 (or an element or subsequence thereof as described in the table), or a nucleic acid sequence having at least 75%, 80%, 85%, 90%, 95%, 96%, 97%, 98%, or 99% identity thereto.

[1967] In some embodiments, a vector plasmid (e.g., suitable for use in a three-plasmid system as described herein) comprises the nucleic acid sequence of a vector plasmid as listed in any of Tables Z6 or Z7 (or an element or subsequence thereof as described in the respective table), or a nucleic acid sequence having at least 75%, 80%, 85%, 90%, 95%, 96%, 97%, 98%, or 99% identity thereto. In some embodiments, a recombined vector plasmid (e.g., a minicircle as described herein) comprises the nucleic acid sequence of a vector plasmid as listed in any of Tables Z8 or Z9 (or an element or subsequence thereof as described in the respective table), or a nucleic acid sequence having at least 75%, 80%, 85%, 90%, 95%, 96%, 97%, 98%, or 99% identity thereto. In some embodiments, a recombinase expression plasmid (e.g., suitable for use in a three-plasmid system as described herein) comprises the nucleic acid sequence of a vector plasmid as listed in Table Z10 (or an element or subsequence thereof as described in the table), or a nucleic acid sequence having at least 75%, 80%, 85%, 90%, 95%, 96%, 97%, 98%, or 99% identity thereto.

[1968] In any of the embodiments, the coding sequence of the transgene (e.g., eGFP) in the vector plasmids may be replaced with any transgene, e.g. a transgene encoding an exogenous effector, e.g., a therapeutic effector (e.g., as described herein).

[1969] In some embodiments, the SRR plasmid comprises the sequence of an exemplary plasmid as described in the SRR constructs section below.

TABLE Z1
Exemplary floxed Ring19 vector plasmid
for three-plasmid systems (pRTx-2847)

| | |
|---|---|
| Name | pRTx-2847 |
| Type | Plasmid |
| Description | pLox- |
| | Ring19ΔORF::fCMV_EGFP_WPRE_bGH- |
| | pA-Rand100. |
| Length | 5452 bp |

(SEQ ID NO: 2618)

| | |
|---|---|
| Annotations: | |
| Region/Element | Base range |
| Lox71 (loxP site) | 432-465 |
| GC-rich region | 529-640 |
| Initiator element | 813-828 |
| 5′ UTR conserved | 880-950 |
| domain | |
| Intron 1 | 892-979 |
| Full CMV promoter | 1004-1573 |
| Inert 5′ UTR | 1585-1619 |
| eGFP coding sequence | 1620-2339 |
| WPRE | 2343-2934 |
| bGHpA terminator | 2939-3166 |
| sequence | |
| 100 bp random stuffer | 3167-3266 |
| sequence | |
| Lox66 (loxP site) | 3271-3304 |
| LacI repressor binding | 3384-3406 |
| site (complement) | |
| Lac operon operator | 3386-3402 |
| (lacO) | |
| Lac operon promoter | 3410-3440 |
| (complement) | |
| C-tag | 3418-3429 |
| E coli catabolite activator | 3455-3476 |
| protein binding site | |
| (complement) | |
| Origin of replication | 3705-4378 |
| (pUC origin) | |
| (complement) | |
| Kanamycin resistance | 4530-5339 |
| (KanR) CDS | |
| (complement) | |

TABLE Z2
Exemplary floxed Ring19 vector plasmid after recombination
event (pRTx-2847, post-recombination)

| | |
|---|---|
| Name | pRTx-2847_post_recombine |
| Type | Circular DNA |
| Description | pLox- |
| | Ring19ΔORF::fCMV_EGFP_WPRE_bGH- |
| | pA-Rand100 after recombination by Cre |
| | recombinase |
| Length | 2839 bp |

(SEQ ID NO: 2619)

| | |
|---|---|
| Annotations: | |
| Region/Element | Base range |
| Full CMV promoter | 1-570 |
| Inert 5′ UTR | 582-616 |
| eGFP coding sequence | 617-1336 |
| WPRE | 1340-1931 |
| bHGpA terminator | 1936-2163 |
| sequence | |
| 100 bp random stuffer | 2164-2263 |
| sequence | |
| loxP site | 2268-2301 |
| GC-rich region | 2365-2476 |
| Initiator element | 2649-2664 |
| 5′ UTR conserved | 2716-2786 |
| domain | |
| Intron 1 | 2728-2815 |

TABLE Z3
Exemplary floxed Ring2 vector plasmid
for three-plasmid systems (pRTx-2846)

| | |
|---|---|
| Name | pRTx-2846 |
| Type | Plasmid |
| Description | pLox- |
| | Ring2ΔORF::fCMV_EGFP_WPRE_bGH- |
| | pA-Rand200 |
| Length | 5980 bp |

(SEQ ID NO: 2620)

| | |
|---|---|
| Annotations: | |
| Region/Element | Base range |
| Kanamycin resistance | 1031-1840 |
| (KanR) CDS (complement) | |
| T7 RNA polymerase | 2345-2362 |
| promoter | |
| Lox71 (loxP site) | 2412-2445 |
| VL46-002-LY2 gene | 2446-2610 |
| GC-rich region | 2501-2612 |
| VL46-002-LY2 gene | 2615-3035 |
| Promoter | 2634-2877 |
| Initiator element | 2869-2884 |
| 5′ UTR conserved domain | 2935-3005 |
| Origin of replication | 2935-3005 |
| Intron 1 | 2947-3035 |
| Full CMV promoter | 3060-3629 |
| Inert 5′UTR | 3641-3675 |
| eGFP CDS | 3676-4395 |
| WPRE | 4399-4990 |
| bGHpA terminator | 4995-5222 |
| sequence | |
| 200 bp random stuffer | 5223-5422 |
| sequence | |
| Lox66 (loxP site) | 5427-5460 |
| LacUV5 promoter | 5895-5925 |
| (complement) | |
| C-tag | 5903-5914 |
| CAP binding site | 5940-5961 |
| CAP binding site | 5940-5961 |
| (complement) | |

TABLE Z4
Exemplary floxed Ring2 vector plasmid after recombination
event (pRTx-2846, post-recombination)

| | |
|---|---|
| Name | pRTx-2846_post_recombine |
| Type | Recombinant Plasmid |
| Description | pLox- |
| | Ring2ΔORF::fCMV_EGFP_WPRE_bGH- |
| | pA-Rand200 after recombination by Cre |
| | recombinase |
| Length | 3015 bp |

(SEQ ID NO: 2621)

| | |
|---|---|
| Annotations: | |
| Region/Element | Base range |
| Full CMV promoter | 1-570 |
| Inert 5′UTR | 582-616 |
| eGFP CDS | 617-1336 |
| WPRE | 1340-1931 |
| bGHpA terminator | 1936-2163 |
| sequence | |
| 200 bp random stuffer | 2164-2363 |
| sequence | |
| loxP site | 2368-2401 |
| VL46-002-LY2 gene | 2402-2566 |
| GC-rich region | 2457-2568 |
| VL46-002-LY2 gene | 2571-2991 |
| Promoter | 2590-2833 |
| Initiator element | 2825-2840 |
| 5′UTR conserved domain | 2891-2961 |
| Origin of replication | 2891-2961 |
| Intron 1 | 2903-2991 |

TABLE Z5
Exemplary Cre recombinase expression plasmid (pRTx-2848)

| | |
|---|---|
| Name | pRTx-2848 |
| Type | Plasmid |
| Description | CMV_iCre_pcDNA3.1(+). |
| Length | 6473 bp |

(SEQ ID NO: 2622)

| | |
|---|---|
| Annotations: | |
| Region/Element | Base range |
| CMV enhancer | 235-614 |
| CMV promoter | 615-818 |
| T7 RNA polymerase promoter | 863-880 |
| iCre coding sequence | 964-2019 |
| bGHpA terminator sequence | 2070-2293 |
| Origin of replication | 2962-3097 |
| SV40 polyA sequence | 4146-4267 |
| Lac operon operator (lacO) | 4340-4356 |
| Lac operon promoter (complement) | 4364-4394 |
| C-tag | 4372-4383 |
| Catabolite activator protein binding site | 4409-4430 |
| Origin of replication (complement) | 4718-5306 |
| Ampicillin resistance gene promoter | 6338-6442 |
| (complement) | |

TABLE Z6
Exemplary Ring19 vector plasmid for Bxb1
three-plasmid systems (pRTx-3757)

| | |
|---|---|
| Name | pRTx-3757 |
| Type | Plasmid |
| Description | Ring19 genetic element construct |
| | with Bxb1 recognition sites |
| Length | 5500 bp |

(SEQ ID NO: 2623)

| | |
|---|---|
| Annotations: | |
| Region/Element | Base range |
| Origin of replication (complement) | 1-589 |
| Kanamycin resistance gene CDS | 767-1576 |
| (complement) | |
| attB site | 2118-2163 |
| GC-rich region | 2231-2342 |
| Initiator element | 2515-2530 |
| 5′UTR conserved domain | 2582-2652 |
| Origin of replication | 2582-2652 |
| Intron 1 | 2594-2681 |
| CMV enhancer | 2695-3074 |
| Full CMV promoter | 2710-3279 |
| CMV promoter | 3075-3278 |
| Kozak sequence | 3320-3329 |
| eGFP CDS | 3326-4045 |
| WPRE | 4049-4640 |
| Factor Xa recognition and cleavage | 4520-4531 |
| site (complement) | |
| bGHpA terminator sequence | 4645-4872 |
| 100 bp random stuffer sequence | 4873-4972 |
| attP site | 4981-5038 |
| Lac operon operator | 5123-5139 |
| LacI repressor binding site | 5123-5139 |
| Lac operon promoter (complement) | 5147-5177 |
| CAP binding site | 5192-5213 |

TABLE Z7
Exemplary Ring19 vector plasmid after Bxb1 recombination
event (pRTx-3757, post-recombination)

| | |
|---|---|
| Name | pRTx-3757_post_recombine |
| Type | Recombinant Plasmid |
| Description | Ring19 genetic element construct |
| | after recombination by Bxb1 |
| Length | 2867 bp |

(SEQ ID NO: 2624)

| | |
|---|---|
| Annotations: | |
| Region/Element | Base range |
| GC-rich region | 64-175 |
| Initiator element | 348-363 |
| 5′UTR conserved domain | 415-485 |
| Origin of replication | 415-485 |
| Intron 1 | 427-514 |
| CMV enhancer | 528-907 |
| Full CMV promoter | 543-1112 |
| CMV promoter | 908-1111 |
| Kozak sequence | 1153-1162 |
| eGFP CDS | 1159-1878 |
| WPRE | 1882-2473 |
| Factror Xa recognition and cleavage | 2353-2364 |
| site (complement) | |
| bGHpA terminator sequence | 2478-2705 |
| 100 bp random stuffer sequence | 2706-2805 |
| attR site | 2814-2867 |

TABLE Z8
Exemplary Ring2 vector plasmid for Bxb1
three-plasmid systems (pRTx-3852)

| | |
|---|---|
| Name | pRTx-3852 |
| Type | Plasmid |
| Description | Ring2 genetic element construct |
| | with Bxb1 recognition sites |
| Length | 5576 bp |

(SEQ ID NO: 2625)

| | |
|---|---|
| Annotations: | |
| Region/Element | Base range |
| attB site | 431-480 |
| VL46-002-LY2 gene | 481-645 |
| GC-rich region | 536-647 |
| Promoter | 669-912 |
| Initiator element | 904-919 |
| Origin of replication | 970-1040 |
| 5′UTR conserved domain | 970-1040 |
| Intron 1 | 982-1070 |
| CMV enhancer | 1084-1463 |
| Full CMV promoter | 1099-1668 |
| CMV promoter | 1464-1667 |
| Kozak sequence | 1709-1718 |
| eGFP CDS | 1715-2434 |
| WPRE | 2438-3029 |
| Factor Xa recognition and cleavage site | 2909-2920 |
| (complement) | |
| bGHpA terminator sequence | 3034-3261 |
| 100 bp random stuffer sequence | 3262-3361 |
| attP site | 3370-3427 |
| Lac operon operator | 3512-3528 |
| LacI repressor binding site | 3512-3528 |
| Lac operon promoter (complement) | 3536-3566 |
| CAP binding site | 3581-3602 |
| ColE1/pMB1/pBR322/pUC origin of | 3890-4478 |
| replication (complement) | |
| Kanamycin resistance gene CDS | 4656-5465 |
| (complement) | |

TABLE Z9
Exemplary Ring2 vector plasmid after Bxb1 recombination
event (pRTx-3852, post-recombination)

| | |
|---|---|
| Name | pRTx-3852_post_recombine |
| Type | Recombinant Plasmid |
| Description | Ring2 genetic element construct |
| | after recombination by Bxb1 |
| Length | 2943 bp |

(SEQ ID NO: 2626)

| | |
|---|---|
| Annotations: | |
| Region/Element | Base range |
| VL46-002-LY2 gene | 1-165 |
| GC-rich region | 56-167 |
| Promoter | 189-432 |
| Initiator element | 424-439 |
| Origin of replication | 490-560 |
| 5′UTR conserved domain | 490-560 |
| Intron 1 | 502-590 |
| CMV enhancer | 604-983 |
| Full CMV promoter | 619-1188 |
| CMV promoter | 984-1187 |
| Kozak sequence | 1229-1238 |
| eGFP CDS | 1235-1954 |
| WPRE | 1958-2549 |
| Factor Xa recognition and cleavage | 2429-2440 |
| site (complement) | |
| bGHpA terminator sequence | 2554-2781 |
| 100 bp random stuffer sequence | 2782-2881 |
| attR site | 2890-2943 |

TABLE Z10
Exemplary CMV-Bxb1 recombinase
expression plasmid (pRTx-3542)

| | |
|---|---|
| Name | pRTx-3542 |
| Type | Plasmid |
| Description | Bxb1 integrase expression |
| | plasmid |
| Length | 7003 bp |

(SEQ ID NO: 2627)

| | |
|---|---|
| Annotations: | |
| Region/Element | Base range |
| CMV enhancer | 235-614 |
| CMV promoter | 615-818 |
| T7 RNA polymerase promoter | 863-881 |
| Bxb1 CDS | 934-2490 |
| SV40 nuclear localization signal CDS | 937-957 |
| HA epitope tag CDS | 958-984 |
| bGHpA terminator sequence | 2600-2824 |
| F1 origin of replication | 2870-3298 |
| SV40 promoter | 3312-3641 |
| SV40 origin of replication | 3492-3627 |
| Neomycin/Kanamycin resistance gene CDS | 3708-4502 |
| SV40 pA signal | 4676-4797 |
| LacI repressor binding site | 4870-4886 |
| Lac operon promoter (complement) | 4894-4924 |
| CAP binding site | 4939-4960 |
| ColE1/pMB1/pBR322/pUC origin of | 5248-5836 |
| replication (complement) | |
| Ampicillin resistance (AmpR) gene CDS | 6007-6867 |
| (complement) | |
| AmpR promoter (complement) | 6868-6972 |

### Exemplary NLS_HA_Bxb1 Integrase Amino Acid Sequence (e.g., Encoded by Nucleotides 934-2490 of Table Z10):

(SEQ ID NO: 2628)
MPKKKRKVYPYDVPDYAGSRALVVIRLSRVTDATTSPERQLESCQQLCA
QRGWDVVGVAEDLDVSGAVDPFDRKRRPNLARWLAFEEQPFDVIVAYRV
DRLTRSIRHLQQLVHWAEDHKKLVVSATEAHFDTTTPFAAVVIALMGTV
AQMELEAIKERNRSAAHFNIRAGKYRGSLPPWGYLPTRVDGEWRLVPDP
VQRERILEVYHRVVDNHEPLHLVAHDLNRRGVLSPKDYFAQLQGREPQG
REWSATALKRSMISEAMLGYATLNGKTVRDDDGAPLVRAEPILTREQLE
ALRAELVKTSRAKPAVSTPSLLLRVLFCAVCGEPAYKFAGGGRKHPRYR
CRSMGFPKHCGNGTVAMAEWDAFCEEQVLDLLGDAERLEKVWVAGSDSA
VELAEVNAELVDLTSLIGSPAYRAGSPQREALDARIAALAARQEELEGL
EARPSGWEWRETGQRFGDWWREQDTAAKNTWLRSMNVRLTFDVRGGLTR
TIDFGDLQEYEQHLRLGSVVERLHTGMS

### Exemplary SV40 Nuclear Localization Signal Amino Acid Sequence (e.g., Encoded by Nucleotides 937-957 of Table Z10): PKKKRKV (SEQ ID NO: 2629)

(SEQ ID NO: 2629)
PKKKRKV

### Exemplary HA Epitope Tag Amino Acid Sequence (e.g., Encoded by Nucleotides 958-984 of Table Z10):

(SEQ ID NO: 2504)
YPYDVPDYA

### Two-Plasmid Systems

[1973] In some embodiments, a site specific recombinase-based system for producing genetic elements comprises two plasmids: (1) a first plasmid (e.g., a vector plasmid) comprising the sequence of the genetic element, flanked by a pair of recombinase recognition sites; and (2) a second plasmid (e.g., a self-replicating rescue (SRR) plasmid) providing one or more Anelloviridae family viral proteins (e.g., Anellovirus ORF1, ORF3, and/or ORF3 molecules; or CAV VP1, VP2, and/or VP3 molecules), including a capsid protein (e.g., an ORF1 molecule or VP1 molecule, e.g., as described herein). In certain embodiments, the first plasmid further comprises a cassette encoding a site-specific recombinase (e.g., as described herein) capable of recognizing the recombinase recognition sites. In certain embodiments, the second plasmid comprises a cassette encoding a site-specific recombinase (e.g., as described herein) capable of recognizing the recombinase recognition sites. In certain embodiments, the first plasmid and the second plasmid each comprise a cassette encoding a site-specific recombinase (e.g., as described herein) capable of recognizing the recombinase recognition sites. In some embodiments, the ORF1 molecule encoded by one of the plasmids comprises a deletion relative to a wild-type Anellovirus ORF1 protein (e.g., a deletion of all or part of an Anellovirus ORF1 structural arginine-rich region and/or structural C-terminal domain (CTD), e.g., as described herein).

[1974] In some embodiments, the portion of the first plasmid flanked by recombination recognition sites comprises, in order: (i) a 5′ NCR of an Anelloviridae family virus (e.g., Ring2, Ring19, Ring20, or CAV), or a nucleic acid sequence having at least 75%, 80%, 85%, 90%, 95%, 96%, 97%, 98%, or 99% identity thereto; (ii) a nucleic acid sequence encoding a transgene of interest; and (iii) a 3′ NCR of an Anelloviridae family virus (e.g., Ring2, Ring19, Ring20, or CAV), or a nucleic acid sequence having at least 75%, 80%, 85%, 90%, 95%, 96%, 97%, 98%, or 99% identity thereto.

[1975] In some embodiments, the portion of the first plasmid flanked by recombination recognition sites comprises, in order: (i) a 3′ NCR of an Anelloviridae family virus (e.g., Ring2, Ring19, Ring20, or CAV), or a nucleic acid sequence having at least 75%, 80%, 85%, 90%, 95%, 96%, 97%, 98%, or 99% identity thereto; (ii) a 5′ NCR of an Anelloviridae family virus (e.g., Ring2, Ring19, Ring20, or CAV), or a nucleic acid sequence having at least 75%, 80%, 85%, 90%, 95%, 96%, 97%, 98%, or 99% identity thereto; and (iii) a nucleic acid sequence encoding a transgene of interest.

[1976] A host cell may comprise the first plasmid and/or the second plasmid. Expression of the site-specific recombinase (e.g., from the cassette in the first plasmid or the cassette in the second plasmid) enables recombination of the first plasmid to produce minicircles comprising the genetic element sequence (which may, in some instances, be converted to cssDNA in the cell). Capsid proteins (e.g., ORF1 molecules or VP1 molecules) can be expressed from the second plasmid, and can then form proteinaceous exteriors (e.g., as described herein) encapsulating the genetic elements (e.g., after conversion to cssDNA), thereby producing Anelloviridae family vector particles. In some embodiments, expression of an ORF2 or ORF3 molecule, or a VP2 or VP3 molecule, from the second plasmid contributes to replication and/or packaging.

[1977] Non-limiting examples of first plasmids suitable for use in a two-plasmid recombinase system as described herein are provided in Tables Z11-Z18 below. Tables Z11-Z14 provide exemplary first plasmid (e.g., vector plasmid) sequences for use in a two-plasmid system utilizing Cre recombinase to recombine a genetic element sequence flanked by loxP recombinase recognition sites. Tables Z15-Z18 provide exemplary first plasmid (e.g., vector plasmid) sequences for use in a two-plasmid system utilizing Bxb1 recombinase to recombine attB and attP sites flanking the genetic element sequence.

[1978] In some embodiments, a vector plasmid (e.g., suitable for use in a two-plasmid system as described herein) comprises the nucleic acid sequence of a vector plasmid as listed in any of Tables Z11 or Z13 (or an element or subsequence thereof as described in the respective table), or a nucleic acid sequence having at least 75%, 80%, 85%, 90%, 95%, 96%, 97%, 98%, or 99% identity thereto. In some embodiments, a recombined vector plasmid (e.g., a minicircle as described herein) comprises the nucleic acid sequence of a vector plasmid as listed in any of Tables Z12 or Z14 (or an element or subsequence thereof as described in the respective table), or a nucleic acid sequence having at least 75%, 80%, 85%, 90%, 95%, 96%, 97%, 98%, or 99% identity thereto.

[1979] In some embodiments, a vector plasmid (e.g., suitable for use in a two-plasmid system as described herein) comprises the nucleic acid sequence of a vector plasmid as listed in any of Tables Z15 or Z17 (or an element or subsequence thereof as described in the respective table), or a nucleic acid sequence having at least 75%, 80%, 85%, 90%, 95%, 96%, 97%, 98%, or 99% identity thereto. In some embodiments, a recombined vector plasmid (e.g., a minicircle as described herein) comprises the nucleic acid sequence of a vector plasmid as listed in any of Tables Z16 or Z18 (or an element or subsequence thereof as described in the respective table), or a nucleic acid sequence having at least 75%, 80%, 85%, 90%, 95%, 96%, 97%, 98%, or 99% identity thereto.

[1980] In any of the embodiments, the coding sequence of the transgene (e.g., eGFP, lacZ) in the vector plasmids may be replaced with any transgene, e.g., a transgene encoding an exogenous effector, e.g., a therapeutic effector (e.g., as described herein).

[1981] In some embodiments, the second plasmid comprises the sequence of an exemplary SRR plasmid as described in the SRR constructs section below.

TABLE Z11
Exemplary Ring19 vector plasmid encoding
Cre recombinase (pRTx-3975)

| | |
|---|---|
| Name | pRTx-3975 |
| Type | Plasmid |
| Description | Ring19iCREM |
| Length | 6246 bp |

(SEQ ID NO: 2630)

| | |
|---|---|
| Annotations: | |
| Region/Element | Base range |
| pUC origin of replication (complement) | 1-674 |
| Kanamycin resistance (KanR) CDS (complement) | 826-1635 |
| Lox71 (loxP site) | 2180-2213 |
| GC rich region | 2277-2388 |
| Initiator element | 2561-2576 |
| Origin of replication | 2628-2698 |
| 5′UTR conserved domain | 2628-2698 |
| Intron 1 | 2640-2727 |
| LacZa CDS (complement) | 2866-3189 |
| LacZa multiple cloning site | 3116-3172 |
| Lac operon operator | 3209-3225 |
| Lac operon promoter (complement) | 3227-3266 |
| C tag | 3241-3252 |
| CAP binding site (complement) | 3278-3299 |
| CAP binding site | 3278-3299 |
| lox66 (loxP site) | 3416-3449 |
| CMV enhancer | 3506-3885 |
| CMV promoter | 3886-4089 |
| Insert sequence | 4085-5408 |
| T7 RNA polymerase promoter | 4134-4152 |
| Chimeric human beta-globin and immunoglobulin | 4448-4580 |
| heavy chain intron | |
| bGHpA terminator sequence | 5479-5703 |
| F1 origin of replication | 5749-5876 |
| LacI repressor binding site (complement) | 5926-5948 |
| Lac operon operator | 5928-5944 |
| Lac operon promoter (complement) | 5952-5982 |
| C tag | 5960-5971 |
| CAP binding site (complement) | 5997-6018 |
| CAP binding site | 5997-6018 |

TABLE Z12
Exemplary Ring19 vector plasmid encoding Cre recombinase
after recombination event (pRTx-3975, post-recombination)

| | |
|---|---|
| Name | pRTx-3975_post_recombine |
| Type | Circular DNA |
| Description | Ring19iCREM post recombination |
| Length | 1236 bp |

(SEQ ID NO: 2631)

| | |
|---|---|
| Annotations: | |
| Region/Element | Base range |
| GC rich region | 1-112 |
| Initiator element | 285-300 |
| Origin of replication | 352-422 |
| 5′UTR conserved domain | 352-422 |
| Intron 1 | 364-451 |
| LacZa CDS (complement) | 590-913 |
| LacZa multiple cloning site | 840-896 |
| Lac operon operator | 933-949 |
| Lac operon promoter (complement) | 951-990 |
| C tag | 965-976 |
| CAP binding site (complement) | 1002-1023 |
| Cap binding site | 1002-1023 |
| loxP site | 1140-1173 |

TABLE Z13
Exemplary Ring2 vector plasmid encoding
Cre recombinase (pRTx-3974)

| | |
|---|---|
| Name | pRTx-3974 |
| Type | Plasmid |
| Description | Ring2iCREM |
| Length | 6674 bp |

(SEQ ID NO: 2632)

| | |
|---|---|
| Annotations: | |
| Region/Element | Base range |
| Origin of replication (complement) | 272-860 |
| Kanamycin Resistance (KanR) CDS | 1031-1840 |
| (complement) | |
| T7 RNA polymerase promoter | 2345-2363 |
| Lox71 (loxP site) | 2412-2445 |
| Ring2 NCR | 2446-3035 |
| VL46-002-LY2 gene | 2446-2610 |
| GC-rich region | 2501-2612 |
| HP3 | 2532-2552 |
| VL46-002-LY2 gene | 2615-3035 |
| Promoter | 2634-2877 |
| Initiator element | 2869-2884 |
| Origin of replication | 2935-3005 |
| 5′UTR conserved domain | 2935-3005 |
| Intron 1 | 2947-3035 |
| LacZa CDS (complement) | 3174-3497 |
| LacZa multiple cloning site | 3424-3480 |
| Lac operon operator | 3517-3533 |
| Lac operon promoter (complement) | 3535-3574 |
| Lac operon promoter (complement) | 3541-3571 |
| C tag | 3549-3560 |
| CAP binding site (complement) | 3586-3607 |
| CAP binding site | 3586-3607 |
| Lox66 (loxP site) | 3724-3757 |
| CMV enhancer | 4177-4556 |
| CMV promoter | 4557-4760 |
| Insert sequence | 4756-6079 |
| T7 RNA polymerase promoter | 4805-4823 |
| Chimeric human beta-globin and | 5119-5251 |
| immunoglobulin heavy chain intron | |
| bGHpA terminator sequence | 6150-6374 |
| Origin of replication | 6420-6547 |
| LacUV5 promoter (complement) | 6589-6619 |
| C tag | 6597-6608 |
| CAP binding site (complement) | 6634-6655 |
| CAP binding site | 6634-6655 |

TABLE Z14
Exemplary Ring2 vector plasmid encoding Cre recombinase
after recombination event (pRTx-3974, post-recombination)

| | |
|---|---|
| Name | pRTx-3974_post_recombine |
| Type | Circular DNA |
| Description | Ring2iCREM post recombination |
| Length | 1312 bp |

(SEQ ID NO: 2633)

| | |
|---|---|
| Annotations: | |
| Region/Element | Base range |
| Ring2 NCR | 1-590 |
| VL46-002-LY2 gene | 1-165 |
| GC rich region | 56-167 |
| HP3 | 87-107 |
| VL46-002-LY2 gene | 170-590 |
| Promoter | 189-432 |
| Initiator element | 424-439 |
| Origin of replication | 490-560 |
| 5′UTR conserved domain | 490-560 |
| Intron 1 | 502-590 |
| LacZa CDS (complement) | 729-1052 |
| LacZa multiple cloning site | 979-1035 |
| Lac operon operator | 1072-1088 |
| LacI repressor binding site | 1072-1088 |
| Lac operon promoter (complement) | 1090-1129 |
| Lac operon promoter (complement) | 1096-1126 |
| C tag | 1104-1115 |
| CAP binding site (complement) | 1141-1162 |
| CAP binding site | 1141-1162 |
| LoxP site | 1279-1312 |

TABLE Z15
Exemplary Ring19 vector plasmid encoding
Bxb1 recombinase (pRTx-3900)

| | |
|---|---|
| Name | pRTx-3900 |
| Type | Plasmid |
| Description | Ring19 genetic element construct |
| | with Bxb1 recognition sites and |
| | Bxb1 expression cassette |
| Length | 8345 bp |

(SEQ ID NO: 2634)
Annotations:

| Region/Element | Base range |
|---|---|
| ColE1/pMB1/pBR322/pUC origin of | 1-589 |
| replication (complement) | |
| Kanamycin resistance gene CDS | 767-1576 |
| (complement) | |
| attB site | 2118-2163 |
| GC-rich region | 2231-2342 |
| Initiator element | 2515-2530 |
| 5′UTR conserved domain | 2582-2652 |
| Intron 1 | 2594-2681 |
| Full CMV promoter | 2710-3279 |
| eGFP CDS | 3326-4045 |
| WPRE | 4049-4640 |
| bGHpA terminator sequence | 4645-4872 |
| 100 bp random stuffer sequence | 4873-4972 |
| attP site | 4981-5038 |
| CMV enhancer | 5098-5477 |
| CMV promoter | 5478-5681 |
| T7 RNA polymerase promoter | 5726-5744 |
| Insert sequence | 5774-7481 |
| Chimeric human beta-globin and | 6047-6179 |
| immunoglobulin heavy chain intron | |
| bGHpA terminator sequence | 7575-7799 |
| Chimeric human beta-globin and | 7781-7799 |
| immunoglobulin heavy chain intron | |
| EAM051 (complement) | |
| Chimeric human beta-globin and | 7798-7818 |
| immunoglobulin heavy chain intron | |
| S361 (complement) | |
| F1 origin of replication | 7845-7916 |
| Chimeric human beta-globin and | 7957-7979 |
| immunoglobulin heavy chain intron | |
| S120 (complement) | |
| LacI repressor binding site | 7968-7984 |
| Lac operon operator | 7968-7984 |
| Lac operon promoter (complement) | 7992-8022 |
| CAP binding site | 8037-8058 |

### Exemplary Kanamycin Resistance Amino Acid Sequence (e.g., Encoded by Nucleotides Complement (7501-8310) of Table Z15):

(SEQ ID NO: 2635)
MSHIQRETSRPRLNSNMDADLYGYKWARDNVGQSGATIYRLYGKPDAPE
LFLKHGKGSVANDVTDEMVRLNWLTEFMPLPTIKHFIRTPDDAWLLTTA
IPGKTAFQVLEEYPDSGENIVDALAVFLRRLHSIPVCNCPFNSDRVFRL
AQAQSRMNNGLVDASDFDDERNGWPVEQVWKEMHKLLPFSPDSVVTHGD
FSLDNLIFDEGKLIGCIDVGRVGIADRYQDLAILWNCLGEFSPSLQKRL
FQKYGIDNPDMNKLQFHLMLDEFF

TABLE Z16
Exemplary Ring19 vector plasmid encoding Bxb1 recombinase
after recombination event (pRTx-3900, post-recombination)

| | |
|---|---|
| Name | pRTx-3900_post_recombine |
| Type | Recombinant Plasmid |
| Description | Ring19 genetic element construct |
| | after recombination by Bxb1 |
| Length | 2867 bp |

(SEQ ID NO: 2636)
Annotations:

| Region/Element | Base range |
|---|---|
| GC-rich region | 64-175 |
| Initiator element | 348-363 |
| 5′UTR conserved domain | 415-485 |
| Origin of replication | 415-485 |
| Intron 1 | 427-514 |
| CMV enhancer | 528-907 |
| Full CMV promoter | 543-1112 |
| CMV promoter | 908-1111 |
| Kozak sequence | 1153-1162 |
| eGFP CDS | 1159-1878 |
| WPRE | 1882-2473 |
| Factror Xa recognition and cleavage | 2353-2364 |
| site (complement) | |
| bGHpA terminator sequence | 2478-2705 |
| 100 bp random stuffer sequence | 2706-2805 |
| attR site | 2814-2867 |

TABLE Z17
Exemplary Ring2 vector plasmid encoding
Bxb1 recombinase (pRTx-3901)

| | |
|---|---|
| Name | pRTx-3901 |
| Type | Plasmid |
| Description | Ring2 genetic element construct |
| | with Bxb1 recognition sites and |
| | Bxb1 expression cassette |
| Length | 8421 bp |

(SEQ ID NO: 2637)
Annotations:

| Region/Element | Base range |
|---|---|
| attB site | 431-480 |
| VL46-002-LY2 gene | 481-645 |
| GC-rich region | 536-647 |
| Promoter | 669-912 |
| Full CMV promoter | 1099-1668 |
| Kozak sequence | 1709-1718 |
| eGFP CDS | 1715-2434 |
| WPRE | 2438-3029 |
| bGHpA terminator sequence | 3034-3261 |
| 100 bp random stuffer sequence | 3262-3361 |
| attP site | 3370-3427 |
| CMV enhancer | 3487-3866 |
| CMV promoter | 3867-4070 |
| T7 RNA polymerase promoter | 4115-4133 |
| Insert sequence | 4163-5870 |
| Chimeric human beta-globin and | 4436-4568 |
| immunoglobulin heavy chain intron | |
| bGHpA terminator sequence | 5964-6188 |
| F1 origin of replication | 6234-6305 |
| LacI repressor binding site | 6357-6373 |
| Lac operon operator | 6357-6373 |
| Lac operon promoter (complement) | 6381-6411 |
| CAP binding site | 6426-6447 |
| ColE1/pMB1/pBR322/pUC origin of | 6735-7323 |
| replication (complement) | |
| Kanamycin resistance gene CDS | 7501-8310 |
| (complement) | |

TABLE Z18
Exemplary Ring2 vector plasmid encoding Bxb1 recombinase
after recombination event (pRTx-3901, post-recombination)

| | |
|---|---|
| Name | pRTx-3901_post_recombine |
| Type | Recombinant Plasmid |
| Description | Ring2 genetic element construct |
| | after recombination by Bxb1 |
| Length | 2943 bp |

(SEQ ID NO: 2638)
Annotations:

| Region/Element | Base range |
|---|---|
| VL46-002-LY2 gene | 1-165 |
| GC-rich region | 56-167 |
| Promoter | 189-432 |
| Initiator element | 424-439 |
| Origin of replication | 490-560 |
| 5′UTR conserved domain | 490-560 |
| Intron 1 | 502-590 |
| CMV enhancer | 604-983 |
| Full CMV promoter | 619-1188 |
| CMV promoter | 984-1187 |
| Kozak sequence | 1229-1238 |
| eGFP CDS | 1235-1954 |
| WPRE | 1958-2549 |
| Factor Xa recognition and cleavage | 2429-2440 |
| site (complement) | |
| bGHpA terminator sequence | 2554-2781 |
| 100 bp random stuffer sequence | 2782-2881 |
| attR site | 2890-2943 |

### Self-Replicating Rescue (SRR) Constructs (e.g., SRR Plasmids)

[1983] The site-specific recombinase-based systems for producing circular double-stranded genetic elements (e.g., minicircles) can include, in some embodiments, a rescue construct providing one or more Anelloviridae family viral proteins, or functional fragments or variants thereof (e.g., one or more of Anellovirus ORF1, ORF2, and/or ORF3 molecules; or one or more of CAV VP1, VP2, and/or VP3 molecules). In some embodiments, the ORF1 molecule comprises a deletion relative to a wild-type Anellovirus ORF1 protein (e.g., a deletion of all or part of an Anellovirus ORF1 structural arginine-rich region and/or structural C-terminal domain (CTD), e.g., as described herein). In some embodiments, the rescue construct is capable of self-replicating in a host cell (e.g., a self-replicating rescue (SRR) plasmid).

[1984] In some embodiments, the rescue construct includes an expression cassette comprising the protein coding sequence of an Anelloviridae family virus (e.g., an Anellovirus or CAV as described herein), or a sequence having at least 75%, 80%, 85%, 90%, 95%, 96%, 97%, 98%, or 99% identity thereto. In some embodiments, the rescue construct includes a sequence encoding a replication protein (e.g., a large T antigen, a PCV Rep, or a PCV Rep′), or a sequence having at least 75%, 80%, 85%, 90%, 95%, 96%, 97%, 98%, or 99% identity thereto. In some embodiments, the rescue construct includes an exogenous origin of replication (e.g., a viral origin, e.g., an SV40, PCV, or AAV origin). In certain embodiments, the replication protein coding sequence is downstream of an internal ribosome entry site (IRES) positioned downstream of the expression cassette comprising the protein coding sequence of the Anelloviridae family virus. In certain embodiments, the replication protein coding sequence is comprised in a separate cassette from the expression cassette comprising the protein coding sequence of the Anelloviridae family virus. In some embodiments, the rescue construct further comprises one or more additional expression cassettes, e.g., encoding a site-specific recombinase, an Anelloviridae family viral protein (e.g., an Anellovirus ORF1 molecule or a CAV VP1 molecule), a replication protein and/or viral origin (e.g., as described herein), or another transgene of interest.

[1985] In some embodiments, the rescue construct comprises an expression cassette comprising the full protein-coding region of an Anelloviridae family viral genome (e.g., as described herein). In some embodiments, the rescue construct comprises an expression cassette comprising a protein-coding region of an Anelloviridae family viral genome (e.g., as described herein) comprising one or more mutations relative to the corresponding wild-type sequence.

[1986] In certain embodiments, the expression cassette comprises a mutation that prevents expression of a functional ORF1 molecule (e.g., a nonsense mutation, deletion, substitution, replacement, or frameshift) from the protein-coding region. In some embodiments, the mutation is one or more internal stop codons (e.g., TAA) in the ORF1 coding sequence (e.g., the nucleic acid sequence encoding SEQ ID NO: 2696). In some embodiments, the one or more stop codons do not affect the expression of ORF1/1 and other splice variants from the rescue construct. In other embodiments, the expression cassette encodes a functional ORF1 molecule (e.g., a wild-type ORF1 molecule as described herein), or an amino acid sequence having at least 75%, 80%, 85%, 90%, 95%, 96%, 97%, 98%, or 99% identity thereto.

[1987] In some embodiments, the rescue construct comprises an ORF1/1 protein coding region.

[1988] In some embodiments, the rescue construct comprises a single expression cassette (e.g., as described above). In some embodiments, the rescue construct comprises two expression cassettes. In some embodiments, the rescue construct comprises three expression cassettes. In some embodiments, the rescue construct comprises four expression cassettes. In some embodiments, the rescue construct comprises five or more expression cassettes. The exemplary expression cassettes described herein can be positioned in any order within the rescue construct. In some embodiments, one or more of the expression cassettes is in the opposite orientation relative to one or more of the other expression cassettes. In other embodiments, all of the expression cassettes in a rescue construct are in the same orientation relative to each other.

[1989] In some embodiments, the expression cassette includes a promoter. Exemplary promoters that can be included in an expression cassette (e.g., to drive expression of the polypeptide) include, without limitation, constitutive promoters (e.g., CMV, RSV, PGK, EF1a, or SV40), cell or tissue-specific promoters (e.g., skeletal α-actin promoter, myosin light chain 2A promoter, dystrophin promoter, muscle creatine kinase promoter, liver albumin promoter, hepatitis B virus core promoter, osteocalcin promoter, bone sialoprotein promoter, CD2 promoter, immunoglobulin heavy chain promoter, T cell receptor a chain promoter, neuron-specific enolase (NSE) promoter, or neurofilament light-chain promoter), and inducible promoters (e.g., zinc-inducible sheep metallothionine (MT) promoter; the dexamethasone (Dex)-inducible mouse mammary tumor virus (MMTV) promoter; the T7 polymerase promoter system, tetracycline-repressible system, tetracycline-inducible system, RU486-inducible system, rapamycin-inducible system), e.g., as described herein. In certain embodiments, the expression cassette includes a T cell promoter, i.e., a promoter that is capable of driving expression in a T cell (e.g., an MNDU3, SFFV, MSCV, Distal Lek (dLck), CD36, EF1a, RPBSA, or Cbh promoter). In embodiments, the expression cassette comprises an MNDU3 promoter. In embodiments, the MNDU3 promoter comprises at least 75%, 80%, 85%, 90%, 95%, 96%, 97%, 98%, 99%, or 100% sequence identity to the nucleic acid sequence of SEQ ID NO: 2784. In embodiments, the expression cassette comprises a SFFV promoter. In embodiments, the SFFV promoter comprises at least 75%, 80%, 85%, 90%, 95%, 96%, 97%, 98%, 99%, or 100% sequence identity to the nucleic acid sequence of SEQ ID NO: 2786. In embodiments, the expression cassette comprises a MSCV promoter. In embodiments, the MSCV promoter comprises at least 75%, 80%, 85%, 90%, 95%, 96%, 97%, 98%, 99%, or 100% sequence identity to the nucleic acid sequence of SEQ ID NO: 2785.

[1990] In some embodiments, the expression cassette further comprises an enhancer, e.g., as described herein.

[1991] In some embodiments, the promoter is Cbh (CMV early enhancer fused to modified R-actin promoter).

[1992] In some embodiments, the promoter is active in T cells, e.g., MOLT-4 cells. In some embodiments, the promoter is MNDU3 (modified murine leukemia virus long terminal repeat promoter). In some embodiments, the promoter is Distal Lek (dLck). In some embodiments, the promoter is CD36. In some embodiments, the promoter is EF1a. In some embodiments, the promoter is MSCV (murine stem cell virus promoter). In some embodiments, the promoter is synthetic RPBSA promoter. In some embodiments, the promoter is SFFV (spleen focus forming virus promoter).

[1993] In some embodiments, the rescue construct does not contain an Anellovirus NCR sequence (e.g. does not contain an Anellovirus 5′ NCR sequence and/or an Anellovirus 3′ NCR sequence). In some embodiments, the rescue construct does not comprise an Anellovirus 5′ UTR conserved domain. In some embodiments, the rescue construct does not comprise an Anellovirus GC-rich region. In some embodiments, the rescue construct does not comprise an Anellovirus NCR intron. In some embodiments, the rescue construct does not comprise an Anellovirus NCR exon. In some embodiments, the rescue construct does not comprise an Anellovirus NCR intron or exon. In some embodiments, the rescue construct does not contain Anellovirus sequences homologous to the vector plasmid (e.g., a contiguous sequence of at least 10, 20, 30, 40, 50, 60, 70, 80, 90, 100, 125, 150, 175, 200, 250, 300, 400, or 500 nucleotides having sequence identity to any Anellovirus sequence of the same length in the vector plasmid). In some embodiments, the rescue construct contains a native kozak sequence of an Anellovirus ORF2 or VP2 coding sequence. Exemplary SRR plasmids that can, in some embodiments, be used in a site-specific recombinase system as described herein (e.g., a two-plasmid system or three-plasmid system as described herein) are provided in Tables W1-W8. In some embodiments, a rescue construct (e.g., suitable for use in a two- or three-plasmid system as described herein) comprises the nucleic acid sequence of an SRR plasmid as listed in Table WI (or an element or subsequence thereof as described in the respective table), or a nucleic acid sequence having at least 75%, 80%, 85%, 90%, 95%, 96%, 97%, 98%, or 99% identity thereto. In some embodiments, a rescue construct (e.g., suitable for use in a two- or three-plasmid system as described herein) comprises the nucleic acid sequence of an SRR plasmid as listed in Table W2 (or an element or subsequence thereof as described in the respective table), or a nucleic acid sequence having at least 75%, 80%, 85%, 90%, 95%, 96%, 97%, 98%, or 99% identity thereto. In some embodiments, a rescue construct (e.g., suitable for use in a two- or three-plasmid system as described herein) comprises the nucleic acid sequence of an SRR plasmid as listed in Table W3 (or an element or subsequence thereof as described in the respective table), or a nucleic acid sequence having at least 75%, 80%, 85%, 90%, 95%, 96%, 97%, 98%, or 99% identity thereto. In some embodiments, a rescue construct (e.g., suitable for use in a two- or three-plasmid system as described herein) comprises the nucleic acid sequence of an SRR plasmid as listed in Table WX4 (or an element or subsequence thereof as described in the respective table), or a nucleic acid sequence having at least 75%, 80%, 85%, 90%, 95%, 96%, 97%, 98%, or 99% identity thereto. In some embodiments, a rescue construct (e.g., suitable for use in a two- or three-plasmid system as described herein) comprises the nucleic acid sequence of an SRR plasmid as listed in Table WX5 (or an element or subsequence thereof as described in the respective table), or a nucleic acid sequence having at least 75%, 80%, 85%, 90%, 95%, 96%, 97%, 98%, or 99% identity thereto. In some embodiments, a rescue construct (e.g., suitable for use in a two- or three-plasmid system as described herein) comprises the nucleic acid sequence of an SRR plasmid as listed in Table WX6 (or an element or subsequence thereof as described in the respective table), or a nucleic acid sequence having at least 75%, 80%, 85%, 90%, 95%, 96%, 97%, 98%, or 99% identity thereto. In some embodiments, a rescue construct (e.g., suitable for use in a two- or three-plasmid system as described herein) comprises the nucleic acid sequence of an SRR plasmid as listed in Table WX7 (or an element or subsequence thereof as described in the respective table), or a nucleic acid sequence having at least 75%, 80%, 85%, 90%, 95%, 96%, 97%, 98%, or 99% identity thereto. In some embodiments, a rescue construct (e.g., suitable for use in a two- or three-plasmid system as described herein) comprises the nucleic acid sequence of an SRR plasmid as listed in Table WX8 (or an element or subsequence thereof as described in the respective table), or a nucleic acid sequence having at least 75%, 80%, 85%, 90%, 95%, 96%, 97%, 98%, or 99% identity thereto. In some embodiments, a rescue construct (e.g., suitable for use in a two- or three-plasmid system as described herein) comprises the nucleic acid sequence of an SRR plasmid as listed in Table WX9 (or an element or subsequence thereof as described in the respective table), or a nucleic acid sequence having at least 75%, 80%, 85%, 90%, 95%, 96%, 97%, 98%, or 99% identity thereto. In some embodiments, a rescue construct (e.g., suitable for use in a two- or three-plasmid system as described herein) comprises the nucleic acid sequence of an SRR plasmid as listed in Table WI (or an element or subsequence thereof as described in the respective table), or a nucleic acid sequence having at least 75%, 80%, 85%, 90%, 95%, 96%, 97%, 98%, or 99% identity thereto. In some embodiments, a rescue construct (e.g., suitable for use in a two- or three-plasmid system as described herein) comprises the nucleic acid sequence of an SRR plasmid as listed in Table W3A (or an element or subsequence thereof as described in the respective table), or a nucleic acid sequence having at least 75%, 80%, 85%, 90%, 95%, 96%, 97%, 98%, or 99% identity thereto. In some embodiments, a rescue construct (e.g., suitable for use in a two- or three-plasmid system as described herein) comprises the nucleic acid sequence of an SRR plasmid as listed in Table W4 (or an element or subsequence thereof as described in the respective table), or a nucleic acid sequence having at least 75%, 80%, 85%, 90%, 95%, 96%, 97%, 98%, or 99% identity thereto. In some embodiments, a rescue construct (e.g., suitable for use in a two- or three-plasmid system as described herein) comprises the nucleic acid sequence of an SRR plasmid as listed in Table W5 (or an element or subsequence thereof as described in the respective table), or a nucleic acid sequence having at least 75%, 80%, 85%, 90%, 95%, 96%, 97%, 98%, or 99% identity thereto. In some embodiments, a rescue construct (e.g., suitable for use in a two- or three-plasmid system as described herein) comprises the nucleic acid sequence of an SRR plasmid as listed in Table W6 (or an element or subsequence thereof as described in the respective table), or a nucleic acid sequence having at least 75%, 80%, 85%, 90%, 95%, 96%, 97%, 98%, or 99% identity thereto. In some embodiments, a rescue construct (e.g., suitable for use in a two- or three-plasmid system as described herein) comprises the nucleic acid sequence of an SRR plasmid as listed in Table W7 (or an element or subsequence thereof as described in the respective table), or a nucleic acid sequence having at least 75%, 80%, 85%, 90%, 95%, 96%, 97%, 98%, or 99% identity thereto. In some embodiments, a rescue construct (e.g., suitable for use in a two- or three-plasmid system as described herein) comprises the nucleic acid sequence of an SRR plasmid as listed in Table W8 (or an element or subsequence thereof as described in the respective table), or a nucleic acid sequence having at least 75%, 80%, 85%, 90%, 95%, 96%, 97%, 98%, or 99% identity thereto.

TABLE W1
Exemplary Ring19 SRR plasmid (pRTx-3525)

| | |
|---|---|
| Name | pRTx-3525 |
| Type | Plasmid |
| Description | phEF1a_Ring19-UTR- |
| | FullORF_SVLT_SV40ori. |
| Length | 9391 bp |

(SEQ ID NO: 2000)
Annotations:

| Region/Element | Base range |
|---|---|
| pHEf1A promoter | 436-1609 |
| EF-1-alpha core promoter | 457-668 |
| EF-1-alpha intron A | 669-1607 |
| Initiator element | 1614-1618 |
| Exon 1 | 1625-1681 |
| 5′ UTR conserved domain | 1670-1740 |
| Kozak sequence | 1676-1681 |
| Intron 1 | 1682-1769 |
| ORF2/3 coding sequence | 1770-2056, 3756-4131 |
| ORF2/2 coding sequence | 1770-2056, 3629-3902 |
| ORF2 coding sequence | 1770-2060 |
| ORF1 coding sequence | 1952-3919 |
| ORF1/1 coding sequence | 1952-2056, 3629-3919 |
| ORF1/2 coding sequence | 1952-2056, 3756-3902 |
| EMCV internal ribosome entry site (IRES) | 4203-4789 |
| SV40 Large T Antigen coding sequence | 4790-6916 |
| SV40 polyA sequence (complement) | 6947-7068 |
| SV40 origin of replication | 7108-7243 |
| LacI repressor protein binding site | 7325-7341 |
| (complement) | |
| Lac operon promoter (complement) | 7349-7379 |
| CAP binding site (complement) | 7394-7415 |
| pUC origin of replication (complement) | 7644-8317 |
| ColE1/pMB1/pBR322/pUC origin of | 7703-8291 |
| replication | |
| Aminoglycoside phosphotransferase (Kan/ | 8469-9278 |
| G418 resistance protein) coding sequence | |
| (complement) | |

### Exemplary SV40 Large T Antigen Amino Acid Sequence (e.g., Encoded by Nucleotides 4790-6916 of Table W1):

(SEQ ID NO: 2001)
MDKVLNREESLQLMDLLGLERSAWGNIPLMRKAYLKKCKEFHPDKGGDE
EKMKKMNTLYKKMEDGVKYAHQPDFGGFWDATEIPTYGTDEWEQWWNAF
NEENLFCSEEMPSSDDEATADSQHSTPPKKKRKVEDPKDFPSELLSFLS
HAVFSNRTLACFAIYTTKEKAALLYKKIMEKYSVTFISRHNSYNHNILF
FLTPHRHRVSAINNYAQKLCTFSFLICKGVNKEYLMYSALTRDPFSVIE
ESLPGGLKEHDFNPEEAEETKQVSWKLVTEYAMETKCDDVLLLLGMYLE
FQYSFEMCLKCIKKEQPSHYKYHEKHYANAAIFADSKNQKTICQQAVDT
VLAKKRVDSLQLTREQMLTNRFNDLLDRMDIMFGSTGSADIEEWMAGVA
WLHCLLPKMDSVVYDFLKCMVYNIPKKRYWLFKGPIDSGKTTLAAALLE
LCGGKALNVNLPLDRLNFELGVAIDQFLVVFEDVKGTGGESRDLPSGQG
INNLDNLRDYLDGSVKVNLEKKHLNKRTQIFPPGIVTMNEYSVPKTLQA
RFVKQIDFRPKDYLKHCLERSEFLLEKRIIQSGIALLLMLIWYRPVAEF
AQSIQSRIVEWKERLDKEFSLSVYQKMKFNVAMGIGVLDWLRNSDDDDE
DSQENADKNEDGGEKNMEDSGHETGIDSQSQGSFQAPQSSQSVHDHNQP
YHICRGFTCFKKPPTPPPEPET

TABLE W2
Exemplary Ring19 SRR plasmid engineered to remove homology
to WT Anellovirus NCR sequences (pRTx-3856)

| | |
|---|---|
| Name | pRTx-3856 |
| Type | Plasmid |
| Description | pSRR::hEF1a_Ring19- |
| | Kozak-FullORF |
| Length | 9296 bp |

(SEQ ID NO: 2002)
Annotations:

| Region/Element | Base range |
|---|---|
| HEf1A promoter | 447-1620 |
| HEf1A inton A | 680-1618 |
| Inert 5′UTR | 1624-1658 |
| Kozak sequence | 1659-1664 |
| Ring19 ORF2 CDS | 1665-1955 |
| Ring19 ORF2/2 CDS | 1665-1951, 3524-3797 |
| Ring19 ORF 2/3 CDS | 1665-1951, 3651-4026 |
| Ring19 ORF1 CDS | 1847-3814 |
| EMCV internal ribosome entry site (IRES) | 4108-4694 |
| SV40 Large T Antigen coding sequence | 4695-6821 |
| SV40 Large T Antigen nuclear localization | 5070-5090 |
| sequence | |
| SV40 polyA (complement) | 6852-6973 |
| SV40 polyA | 6852-6973 |
| SV40 polyA terminator | 6899-6973 |
| SV40 origin of replication | 7013-7148 |
| LacI binding site (complement) | 7228-7250 |
| Lac operon operator | 7230-7246 |
| LacI binding site | 7230-7246 |
| Lac operon promoter (complement) | 7254-7284 |
| C tag | 7262-7273 |
| CAP binding site (complement) | 7299-7320 |
| CAP binding site | 7299-7320 |
| Origin of replication (complement) | 7549-8222 |
| ColE1/pMB1/pBR322/pUC origin of | 7608-8196 |
| replication (complement) | |
| RNAi transcript | 8050-8157 |
| Kanamycin/G418 resistance CDS | 8374-9183 |
| (complement) | |

TABLE W3
Exemplary Ring2 SRR plasmid (pRTx-3853)

| | |
|---|---|
| Name | pRTx-3853 |
| Type | Plasmid |
| Description | pSRR::hEF1a_Ring2-FullORF |
| Length | 9418 bp |

(SEQ ID NO: 2003)
Annotations:

| Region/Element | Base range |
|---|---|
| HEf1A intron A | 669-1607 |
| Origin of replication | 1669-1739 |
| Intron 1 | 1681-1769 |
| Ring2 ORF 2/2 CDS | 1770-2065, 3620-3935 |
| Ring2 ORF2 CDS | 1770-2069 |
| Ring2 ORF1 CDS | 1958-3958 |
| Ring2 arginine rich domain | 1958-2071 |
| Jelly roll domain | 2072-2695 |
| HVD motif | 2696-3079 |
| N22 motif | 3080-3568 |
| C-terminal domain | 3569-3955 |
| ORFs | 3787-3932 |
| EMCV internal ribosome entry site | 4230-4816 |
| (IRES) | |
| SV40 Large T Antigen nuclear | 5192-5212 |
| localization | |
| SV40 polyA signal (complement) | 6974-7095 |
| SV40 polyA signal | 6974-7095 |
| SV40 origin of replication | 7135-7270 |
| LacI repressor binding site | 7350-7372 |
| (complement) | |
| Lac operon promoter (complement) | 7376-7406 |
| CAP binding site (complement) | 7421-7442 |
| ColE1/pMB1/pBR322/pUC origin of | 7730-8318 |
| replication (complement) | |
| Kanamycin/G418 resistance CDS | 8496-9305 |
| (complement) | |

TABLE WX4
Exemplary Ring19 SRR plasmid (pRTx-4511)

| | |
|---|---|
| Name | pRTx-4511 |
| Type | Plasmid |
| Description | MNDU3_Ring19-UTR- |
| | FullORF_SVLT_SV40ori |
| Length | 8612 bp |

(SEQ ID NO: 2004)
Annotations:

| Region/Element | Base range |
|---|---|
| MNDU3 promoter | 436-830 |
| Initiator element | 835-839 |
| 5′ UTR conserved domain | 891-961 |
| Intron 1 | 903-990 |
| Ring19 ORF2/3 | 991-1277, 2977-3352 |
| Ring19 ORF2/2 | 991-1277, 2850-3123 |
| Ring19 ORF2 | 991-1281 |
| Ring19 ORF1 | 1173-3140 |
| Ring19 ORF1/1 | 1173-1277, 2850-3140 |
| Ring19 ORF1/2 | 1173-1277, 2977-3123 |
| Internal ribosome entry site (IRES) | 3424-4010 |
| SV40 large T antigen | 4011-6137 |
| SV40 polyadenylation signal | 6168-6289 |
| SV40 origin of replication | 6329-6464 |
| Lac operator | 6546-6562 |
| Promoter for the E. coli lac operon | 6570-6600 |
| CAP binding site | 6615-6636 |
| High copy number ColE1/pMB1/pBR322/ | 6924-7512 |
| pUC origin of replication | |

TABLE WX5
Exemplary Ring19 SRR plasmid with NCR intron 1 deletion

| | |
|---|---|
| Name | pRTx-3696 |
| Type | Plasmid |
| Description | hEF1a_Ring19-Exon1- |
| | FullORF_IRES_SVLT_SV40ori |
| Length | 9292 bp |

(SEQ ID NO: 2005)
Annotations:

| Region/Element | Base range |
|---|---|
| pHEf1A promoter | 436-1609 |
| EF-1-alpha intron A | 669-1607 |
| Exon 1 | 1614-1670 |
| Kozak sequence | 1665-1670 |
| Ring19 ORF2 | 1671-1961 |
| Ring19 ORF2/2 | 1671-1957, 3530-3803 |
| Ring19 ORF2/3 | 1671-1957, 3657-4032 |
| Ring19 ORF1 | 1853-3820 |
| Internal ribosome entry site (IRES) | 4104-4690 |
| SV40 large T antigen | 4691-6817 |
| SV40 nuclear localization signal | 5066-5086 |
| SV40 polyadenylation signal | 6848-6969 |
| SV40 origin of replication | 7009-7144 |
| Lac operon operator | 7226-7242 |
| Promoter for the E. coli lac operon | 7250-7280 |
| (complement) | |
| C-tag | 7258-7269 |
| CAP binding site | 7295-7316 |
| High-copy-number ColE1/pMB1/ | 7604-8192 |
| pBR322/pUC origin of replication | |
| (complement) | |
| RNAI transcript | 8046-8153 |
| Kanamycin resistance coding | 8370-9179 |
| sequence (complement) | |

TABLE WX6
Exemplary Ring19 SRR plasmid with
stop codon in ORF1 coding sequence

| | |
|---|---|
| Name | pRTx-3775 |
| Type | Plasmid |
| Description | hEF1a_Ring19- |
| | SRR_FullORF-ORF1KO |
| Length | 9391 bp |

(SEQ ID NO: 2006)
Annotations:

| Region/Element | Base range |
|---|---|
| pHEf1A promoter | 436-1609 |
| EF-1-alpha intron A | 669-1607 |
| 5′ UTR conserved domain | 1670-1740 |
| Intron 1 | 1682-1769 |
| Ring19 ORF2/3 | 1770-2056, 3756-4131 |
| Ring19 ORF2/2 | 1770-2056, 3629-3902 |
| Ring19 ORF2 | 1770-2060 |
| Ring19 ORF1 | 1952-3919 |
| Internal ribosomal entry site (IRES) | 4203-4789 |
| SV40 large T antigen | 4790-6916 |
| SV40 nuclear localization sequence | 5165-5185 |
| SV40 polyadenylation signal | 6947-7068 |
| SV40 origin of replication | 7108-7243 |
| Lac operon operator | 7325-7341 |
| Promoter for the E. coli lac operon | 7349-7379 |
| (complement) | |
| C-tag | 7357-7368 |
| CAP binding site | 7394-7415 |
| pUC origin (complement) | 7644-8317 |
| High-copy-number ColE1/pMB1/pBR322/ | 7703-8291 |
| pUC origin of replication (complement) | |
| RNAI transcript | 8145-8252 |
| Kanamycin resistance coding sequence | 8469-9278 |
| (complement) | |

TABLE WX7
Exemplary Ring19 SRR plasmid encoding ORF1/1

| | |
|---|---|
| Name | pRTx-4534 |
| Type | Plasmid |
| Description | |
| Length | 6536 bp |

(SEQ ID NO: 2007)
Annotations:

| Region/Element | Base range |
|---|---|
| pHEf1A promoter | 174-1347 |
| G−>T mutation | 233 |
| EF-1-alpha intron A | 407-1345 |
| Inert 5′ UTR | 1348-1378 |
| Ring19 ORF1/1 | 1383-1778 |
| Inert 3′ UTR | 1782-1805 |
| Internal ribosome entry site (IRES) | 1810-2396 |
| SV40 large T antigen | 2397-4523 |
| SV40 nuclear localization sequence | 2772-2792 |
| SV40 polyadenylation signal (complement) | 4554-4675 |
| SV40 origin of replication | 4715-4850 |
| High-copy-number ColE1/pMB1/pBR322/pUC | 4937-5525 |
| origin of replication (complement) | |
| Kanamycin resistance coding sequence | 5703-6512 |
| (complement) | |

TABLE WX8
Exemplary Ring2 SRR plasmid with stop
codon in ORF1 coding sequence

| | |
|---|---|
| Name | pRTx-3776 |
| Type | Plasmid |
| Description | hEF1a_Ring2- |
| | SRR_FullORF-ORF1KO |
| Length | 9418 bp |

(SEQ ID NO: 2008)
Annotations:

| Region/Element | Base range |
|---|---|
| pHEf1A | 436-1609 |
| EF-1-alpha intron A | 669-1607 |
| Intron 1 | 1681-1769 |
| Ring2 ORF2 | 1770-2069 |
| Ring2 ORF2/2 | 1770-2065, 3620-3935 |
| Ring2 ORF1 | 1958-3958 |
| Ring2 ORF1 arginine-rich domain | 1958-2071 |
| C-terminal domain | 3569-3955 |
| Internal ribosomal entry site (IRES) | 4230-4816 |
| SV40 large T antigen | 4817-6943 |
| SV40 nuclear localization sequence | 5192-5212 |
| KT3 epitope tag | 6908-6940 |
| SV40 polyadenylation signal | 6974-7095 |
| SV40 origin | 7135-7212 |
| Lac operon operator | 7352-7368 |
| Lac operon promoter (complement) | 7376-7406 |
| C-tag | 7384-7395 |
| CAP binding site | 7421-7442 |
| High-copy-number ColE1/pMB1/pBR322/ | 7730-8318 |
| pUC origin of replication (complement) | |
| RNAI transcript | 8172-8279 |
| Kanamycin resistance coding sequence | 8496-9305 |
| (complement) | |

TABLE WX9
Exemplary Ring2 SRR plasmid encoding ORF1/1

| | |
|---|---|
| Name | pRTx-4463 |
| Type | Plasmid |
| Description | |
| Length | 6588 bp |

(SEQ ID NO: 2009)
Annotations:

| Region/Element | Base range |
|---|---|
| pHEf1A promoter | 174-1347 |
| G−>T mutation | 233 |
| EF-1-alpha intron A | 407-1345 |
| Inert 5′UTR | 1348-1378 |
| Ring2 ORF1/1 | 1383-1829 |
| Inert 3′UTR | 1834-1857 |
| Internal ribosome entry site (IRES) | 1862-2448 |
| SV40 large T antigen | 2449-4575 |
| SV40 nuclear localization signal | 2824-2844 |
| SV40 polyadenylation signal (complement) | 4606-4727 |
| SV40 origin of replication | 4767-4902 |
| High-copy-number ColE1/pMB1/pBR322/pUC | 4989-5577 |
| origin of replication (complement) | |
| Kanamycin resistance coding sequence | 5755-6564 |
| (complement) | |

TABLE W3A
Exemplary YYBYFW Self-replicating Rescue (SRR) plasmid

| | |
|---|---|
| Name | pRTx-4192 |
| Type | Plasmid |
| Description | pSRR::RING-YYBYFW |
| Length | 9274 bp |

(SEQ ID NO: 2774)
Annotations:

| Region/Element | Base range |
|---|---|
| EMCV internal ribosome entry site (IRES) | 81-667 |
| SV40 Large T Antigen coding sequence | 914-2794 |
| SV40 nuclear localization sequence | 1043-1063 |
| KT3 epitope tag | 2759-2791 |
| SV40 polyA sequence | 2825-2946 |
| SV40 polyA sequence (complement) | 2825-2946 |
| Origin of replication | 2986-3121 |
| LacO repressor binding site (complement) | 3201-3223 |
| Lac operon operator | 3203-3219 |
| Lac operon promoter (complement) | 3227-3257 |
| C-tag | 3235-3246 |
| E. coli catabolite activator protein | 3272-3293 |
| (complement) | |
| E. coli catabolite activator protein | 3272-3293 |
| Origin of replication (complement) | 3581-4169 |
| Kanamycin resistance (KanR) CDS | 4347-5156 |
| (complement) | |
| EF-1-alpha intron A | 5949-6887 |
| Origin of replication | 6973-6984 |
| ORF2 coding sequence | 6985-7266 |
| ORF1 coding sequence | 7137-9065 |
| Polyarginine tag | 7248-7262 |
| ORF3 coding sequence | 9095-9274 |

TABLE W4
Exemplary Ring161 Self-replicating Rescue (SRR) plasmid

| | |
|---|---|
| Name | pRTx-4185 |
| Type | Plasmid |
| Description | pSRR::RING161 |
| Length | 9330 bp |

(SEQ ID NO: 2639)
Annotations:

| Region/Element | Base range |
|---|---|
| EF-1-alpha intron A | 680-1618 |
| ORF2-3 coding sequence | 1669-1965 and 3662-4060 |
| ORF2-2 coding sequence | 1669-1965 and 3535-3819 |
| ORF2 coding sequence | 1669-1968 |
| ORF2 motif | 1723-1770 |
| ORF1 coding sequence | 1857-3839 |
| Polyarginine tag | 1881-1895 |
| Polyarginine tag | 1887-1901 |
| ORF1 motif | 2991-3023 |
| ORF3 coding sequence | 3641-4060 |
| ORF3 motif 2 | 3923-4000 |
| ORF3 motif 2 | 4031-4045 |
| EMCV internal ribosome entry site (IRES) | 4142-4728 |
| SV40 Large T Antigen coding sequence | 4975-6855 |
| SV40 nuclear localization sequence | 5104-5124 |
| KT3 epitope tag | 6820-6852 |
| SV40 polyA sequence | 6886-7007 |
| SV40 polyA sequence (complement) | 6886-7007 |
| Origin of replication | 7047-7182 |
| LacI repressor protein binding site (complement) | 7262-7284 |
| LacI repressor protein binding site | 7264-7280 |
| Lac operon operator | 7264-7280 |
| Lac operon promoter (complement) | 7288-7318 |
| C-tag | 7296-7307 |
| E. coli CAP binding site (complement) | 7333-7354 |
| E. coli CAP binding site | 7333-7354 |
| Origin of replication (complement) | 7642-8230 |
| Kanamycin resistance (KanR) CDS (complement) | 8408-9217 |

TABLE W5
Exemplary Ring10 Self-replicating Rescue (SRR) plasmid

| | |
|---|---|
| Name | pRTx-4177 |
| Type | Plasmid |
| Description | pSRR::RING10 |
| Length | 9473 bp |

(SEQ ID NO: 2640)
Annotations:

| Region/Element | Base range |
|---|---|
| EMCV internal ribosome entry site (IRES) | 81-667 |
| SV40 Large T Antigen coding sequence | 914-2794 |
| SV40 nuclear localization sequence | 1043-1063 |
| KT3 epitope tag | 2759-2791 |
| SV40 polyA sequence | 2825-2946 |
| SV40 polyA sequence (complement) | 2825-2946 |
| Origin of replication | 2986-3121 |
| LacI repressor protein binding site (complement) | 3201-3223 |
| LacI repressor protein binding site | 3203-3219 |
| Lac operon operator | 3203-3219 |
| Lac operon promoter (complement) | 3227-3257 |
| C-tag | 3235-3246 |
| E. coli CAP binding site (complement) | 3272-3293 |
| E. coli CAP binding site | 3272-3293 |
| Origin of replication (complement) | 3581-4169 |
| Kanamycin resistance (KanR) CDS (complement) | 4347-5156 |
| EF-1-alpha intron A | 5949-6887 |
| 5′UTR conserved domain | 6978-7048 |
| Origin of replication | 6978-6989 |
| ORF2 coding sequence | 7082-7372 |
| ORF1 coding sequence | 7261-9279 |
| Polyarginine tag | 7351-7365 |
| Factor Xa recognition and cleavage site | 8692-8703 |
| ORF3 coding sequence | 9117-9473 |
| ORF3 motif 2 | 9447-9461 |

TABLE W6
Exemplary Ring34 Self-replicating Rescue (SRR) plasmid

| | |
|---|---|
| Name | pRTx-3906 |
| Type | Plasmid |
| Description | pSRR::hEFla_Ring34 |
| Length | 9320 bp |

(SEQ ID NO: 2641)
Annotations:

| Region/Element | Base range |
|---|---|
| EF-1-alpha intron A | 669-1607 |
| ORF3 coding sequence | 1675-1959 and 3764-4060 |
| ORF2 coding sequence | 1675-1962 |
| ORF1 coding sequence | 1845-3842 |
| ORF3 coding sequence | 3668-4060 |
| EMCV internal ribosome entry site (IRES) | 4132-4718 |
| SV40 Large T Antigen coding sequence | 4965-6845 |
| SV40 Nuclear localization sequence | 5094-5114 |
| KT3 epitope tag | 6810-6842 |
| SV40 polyA sequence (complement) | 6876-6997 |
| SV40 polyA sequence | 6876-6997 |
| Origin of replication | 7037-7172 |
| LacI repressor protein binding site (complement) | 7252-7274 |
| Lac operon operator | 7254-7270 |
| Lac operon promoter (complement) | 7278-7308 |
| C-tag | 7286-7297 |
| E. coli CAP binding site (complement) | 7323-7344 |
| E. coli CAP binding site | 7323-7344 |
| Origin of replication (complement) | 7632-8220 |
| Kanamycin resistance (KanR) CDS (complement) | 8398-9207 |

TABLE W7
Exemplary Ring9 Self-replicating Rescue (SRR) plasmid

| | |
|---|---|
| Name | pRTx-3905 |
| Type | Plasmid |
| Description | pSRR::hEF1a_Ring9 |
| Length | 9289 bp |

(SEQ ID NO: 2642)
Annotations:

| Region/Element | Base range |
|---|---|
| EF-1-alpha intron A | 669-1607 |
| ORF2/3 coding sequence | 1677-1996, 3645-4029 |
| ORF2/2 coding sequence | 1677-1996, 3470-3806 |
| ORF2 coding sequence | 1677-2000 |
| ORF1 coding sequence | 1859-3826 |
| ORF3 coding sequence | 3625-4029 |
| EMCV internal ribosome entry site (IRES) | 4101-4687 |
| SV40 Large T Antigen coding sequence | 4934-6814 |
| SV40 nuclear localization sequence | 5063-5083 |
| KT3 epitope tag | 6779-6811 |
| SV40 polyA sequence (complement) | 6845-6966 |
| SV40 polyA sequence | 6845-6966 |
| Origin of replication | 7006-7141 |
| LacI repressor protein binding site (complement) | 7221-7243 |
| Lac operon operator | 7223-7239 |
| Lac operon promoter (complement) | 7247-7277 |
| C-tag | 7255-7266 |
| E. coli CAP binding site (complement) | 7292-7313 |
| E. coli CAP binding site | 7292-7313 |
| Origin of replication (complement) | 7601-8189 |
| Kanamycin resistance (KanR) CDS (complement) | 8367-9176 |

TABLE W8
Exemplary Ring25 Self-replicating Rescue (SRR) plasmid

| | |
|---|---|
| Name | pRTx-3861 |
| Type | Plasmid |
| Description | pSRR::hEF1a_Ring25 |
| Length | 8635 bp |

(SEQ ID NO: 2643)
Annotations:

| Region/Element | Base range |
|---|---|
| Origin of replication (complement) | 1-589 |
| Kanamycin resistance (KanR) CDS (complement) | 767-1576 |
| pHEf1A promoter | 1774-2947 |
| ORF2 coding sequence | 3116-3418 |
| ORF1 coding sequence | 3289-5271 |
| ORF3 coding sequence | 5229-5477 |
| 3′UTR | 5481-5504 |
| EMCV internal ribosome entry site (IRES) | 5509-6095 |
| SV40 Large T Antigen coding sequence | 6342-8222 |
| SV40 nuclear localization sequence | 6471-6491 |
| SV40 polyA sequence (complement) | 8253-8374 |
| SV40 polyA sequence | 8253-8374 |
| Origin of replication | 8414-8549 |

### Bacterial Minicircle Systems

[1995] Site-specific recombinases can be used to produce circular double-stranded genetic elements (e.g., minicircles) in host cells (e.g., bacterial host cells), which can then, in some embodiments, be isolated from the host cells and used for producing Anelloviridae family vectors via in vitro assembly. In some embodiments, a vector plasmid comprising the sequence of a genetic element flanked by recombinase recognition sites is present in a host cell (e.g., a bacterial host cell, e.g., an E. coli cell) along with a site-specific recombinase capable of recognizing the recombinase recognition sites and initiating their recombination. In certain embodiments, the site-specific recombinase is encoded in the bacterial genome. In other embodiments, the site-specific recombinase is encoded in a second plasmid (e.g., an expression plasmid as described herein). In further embodiments, the site-specific recombinase is encoded by the vector plasmid itself (e.g., in a cassette outside the region flanked by the recombinase recognition sites).

[1996] In some embodiments, the site-specific recombinase is PhiC31. In certain embodiments, the vector plasmid comprises a genetic element sequence flankedby an attB site and an attP site recognizable by PhiC31, e.g., as described herein.

[1997] Non-limiting examples of vector plasmids suitable for use in bacterial cells as described herein are provided in Tables Y1, Y3, and Y5 below. In some embodiments, the vector plasmid comprises the nucleic acid sequence of a vector plasmid as listed in any of Tables Y1, Y3, or Y5 (or an element or subsequence thereof as described in the respective table), or a nucleic acid sequence having at least 75%, 80%, 85%, 90%, 95%, 96%, 97%, 98%, or 99% identity thereto. In some embodiments, the minicircle comprises the nucleic acid sequence of a vector plasmid as listed in any of Tables Y2, Y4, or Y6 (or an element or subsequence thereof as described in the respective table), or a nucleic acid sequence having at least 75%, 80%, 85%, 90%, 95%, 96%, 97%, 98%, or 99% identity thereto.

[1998] In any of the embodiments, the coding sequence of the transgene (e.g., eGFP) in the vector plasmids may be replaced with any transgene, e.g., a transgene encoding an exogenous effector, e.g., a therapeutic effector (e.g., as described herein).

TABLE Y1
Exemplary Ring2 parental vector plasmid (pRTx-3928)

| | |
|---|---|
| Name | pRTx-3928 |
| Type | Plasmid |
| Description | Ring2 minicircle parental plasmid |
| Length | 6951 bp |

(SEQ ID NO: 2775)
Annotations:

| Region/Element | Base range |
|---|---|
| Origin of replication (complement) | 1-589 |
| Ampicillin resistance gene promoter | 660-704 |
| (complement) | |
| rrnB T2 terminator (complement) | 724-751 |
| rrnB T1 terminator (complement) | 843-929 |
| 5S ribosomal RNA (complement) | 931-1046 |
| tnpA fragment CDS | 1159-1431 |
| Neomycin/Kanamycin resistance CDS | 1463-2257 |
| Phage phi-C31 attP recognition site | 2344-2383 |
| PaqCI forward | 2390-2404 |
| bGHpA terminator sequence | 2416-2640 |
| WPRE | 2658-3246 |
| Factor Xa recognition and cleavage site | 2764-2775 |
| eGFP CDS (complement) | 3260-3976 |
| Kozak sequence | 3973-3982 |
| Full CMV promoter | 4030-4599 |
| CMV promoter | 4031-4234 |
| CMV enhancer | 4235-4599 |
| CMV enhancer | 4235-4538 |
| Ring2 NCR | 4611-5200 |
| Intron 1 | 4611-4699 |
| 5′UTR conserved domain | 4641-4711 |
| Origin of replication | 4641-4711 |
| Initiator element | 4762-4777 |
| Promoter | 4769-5012 |
| GC-rich region | 5034-5145 |
| VL46-002-LY2 gene (complement) | 5036-5200 |
| PaqCI forward | 5201-5215 |
| Phage phi-C31 attB site | 5216-5220 |
| Phage phi-C31 attB site (complement) | 5221-5249 |
| araC CDS | 6072-6362 |
| Rop (repressor of primer) CDS | 6484-6524 |
| Bom (basis of mobility) site | 6626-6766 |

Exemplary tnpA Transposase Fragment Amino Acid Sequence (e.g., Encoded by Nucleotides 1159-1431 of Table Y1):

(SEQ ID NO: 2644)
ERVESQSAETVLTPDECQLLGYLDKGKRKRKEKAGSLQWAYMAIARLGG
FMDSKRTGIASWGALW*GWEALQSKLDGFLAAKDLMAQGIKL

### Exemplary Neomycin/Kanamycin Resistance Amino Acid Sequence (e.g., Encoded by Nucleotides 1463-2257 of Table Y1):

(SEQ ID NO: 2645)
MIEQDGLHAGSPAAWVERLFGYDWAQQTIGCSDAAVFRLSAQGRPVLFV
KTDLSGALNELQDEAARLSWLATTGVPCAAVLDVVTEAGRDWLLLGEVP
GQDLLSSHLAPAEKVSIMADAMRRLHTLDPATCPFDHQAKHRIERARTR
MEAGLVDQDDLDEEHQGLAPAELFARLKASMPDGEDLVVTHGDACLPNI
MVENGRFSGFIDCGRLGVADRYQDIALATRDIAEELGGEWADRFLVLYG
IAAPDSQRIAFYRLLDEFF

### Exemplary Factor Xa Recognition and Cleavage Site Amino Acid Sequence (e.g., Encoded by Nucleotides 2764-2775 of Table Y1):

(SEQ ID NO: 2646)
IEGR

Exemplary araC Fragment Amino Acid Sequence (e.g., Encoded by Nucleotides 6072-6362 of Table Y1):

(SEQ ID NO: 2647)
IASVAQHVCLSPSRLSHLFRQQLGISVLSWREDQRISQAKLLLSTTRMP
IATVGRNVGFDDQLYFSRVFKKCTGASPSEFRAGCEEKVNDVAVKLS

### Exemplary Rop Fragment Amino Acid Sequence (e.g., Encoded by Nucleotides 6484-6524 of Table Y1):

(SEQ ID NO: 2648)
AASRVSVMTVKTS

TABLE Y2
Exemplary Ring2 minicircle post-recombination
by PhiC31 (pRTx-3928_MC)

| | |
|---|---|
| Name | pRTx-3928_MC |
| Type | Circular DNA |
| Description | Ring2 minicircle post recombination |
| Length | 2869 bp |

(SEQ ID NO: 2649)
Annotations:

| Region/Element | Base range |
|---|---|
| attB site | 1-10 |
| Synthesize | 11-624 |
| attB site | 11-15 |
| PaqCI forward | 16-30 |
| Ring2 NCR | 31-620 |
| VL46-002-LY2 gene | 31-195 |
| GC-rich region | 86-197 |
| Promoter | 219-462 |
| Initiator element | 454-469 |
| 5′UTR conserved domain | 520-590 |
| Origin of replication | 520-590 |
| Intron 1 | 532-620 |
| Full CMV promoter | 632-1201 |
| CMV enhancer | 632-996 |
| CMV enhancer | 693-996 |
| CMV promoter | 997-1200 |
| Kozak sequence | 1249-1258 |
| eGFP | 1255-1971 |
| WPRE | 1985-2573 |
| Factor Xa recognition and cleavage site (complement) | 2456-2467 |
| bGHpA terminator sequence | 2591-2815 |
| PaqCI forward | 2827-2841 |
| attP site fragment | 2848-2869 |

Exemplary eGFP Amino Acid Sequence (e.g., Encoded by Nucleotides 1255-1971 of Table Y2):

(SEQ ID NO: 2650)
MVSKGEELFTGVVPILVELDGDVNGHKFSVSGEGEGDATYGKLTLKFIC
TTGKLPVPWPTLVTTLTYGVQCFSRYPDHMKQHDFFKSAMPEGYVQERT
IFFKDDGNYKTRAEVKFEGDTLVNRIELKGIDFKEDGNILGHKLEYNYN
SHNVYIMADKQKNGIKVNFKIRHNIEDGSVQLADHYQQNTPIGDGPVLL
PDNHYLSTQSALSKDPNEKRDHMVLLEFVTAAGITLGMDELYK

TABLE Y3
Exemplary Ring19 parental vector plasmid (pRTx-3929)

| | |
|---|---|
| Name | pRTx-3929 |
| Type | Plasmid |
| Description | Ring19 minicircle parental plasmid |
| Length | 6879 bp |

(SEQ ID NO: 2651)
Annotations:

| Region/Element | Base range |
|---|---|
| Origin of replication (complement) | 1-589 |
| Ampicillin resistance promoter (complement) | 660-704 |
| rrnB T2 terminator (complement) | 724-751 |
| rrnB T1 terminator (complement) | 843-929 |
| 5S ribosomal RNA (complement) | 931-1046 |
| tnpA fragment CDS | 1159-1431 |
| Neomycin/Kanamycin resistance gene CDS | 1463-2257 |
| Phage phi-C31 attP site | 2344-2383 |
| PaqCI forward | 2390-2404 |
| bGHpA terminator sequence | 2416-2640 |
| WPRE | 2658-3246 |
| Factor Xa recognition and cleavage site | 2764-2775 |
| eGFP CDS (complement) | 3260-3976 |
| Kozak sequence | 3973-3982 |
| Full CMV promoter | 4030-4599 |
| CMV promoter | 4031-4234 |
| CMV enhancer | 4235-4599 |
| CMV enhancer | 4235-4538 |
| Ring 19 NCR | 4611-5128 |
| Intron 1 | 4611-4698 |
| 5′UTR conserved domain | 4640-4710 |
| Origin of replication | 4640-4710 |
| Initiator element | 4762-4777 |
| GC-rich region | 4950-5061 |
| PaqCI forward | 5129-5143 |
| Phage phi-C31 attB site | 5144-5148 |
| Phage phi-C31 attB site (complement) | 5149-5177 |
| araC fragment CDS | 6000-6290 |
| rop fragment CDS | 6412-6452 |
| bom | 6554-6694 |

TABLE Y4
Exemplary Ring19 minicircle post-recombination
by PhiC31 (pRTx-3929_MC)

| | |
|---|---|
| Name | pRTx-3929_MC |
| Type | Circular DNA |
| Description | Ring19 minicircle post recombination |
| Length | 2797 bp |

(SEQ ID NO: 2652)
Annotations:

| Region/Element | Base range |
|---|---|
| attB site | 1-10 |
| Synthesize | 11-552 |
| attB site | 11-15 |
| PaqCI forward | 16-30 |
| Ring19 NCR | 31-548 |
| GC-rich region | 98-209 |
| Initiator element | 382-397 |
| 5′UTR conserved domain | 449-519 |
| Origin of replication | 449-519 |
| Intron 1 | 461-548 |
| Full CMV promoter | 560-1129 |
| CMV enhancer | 560-924 |
| CMV enhancer | 621-924 |
| CMV promoter | 925-1128 |
| Kozak sequence | 1177-1186 |
| eGFP CDS | 1183-1899 |
| WPRE | 1913-2501 |
| Factor Xa recognition and cleavage site | 2384-2395 |
| (complement) | |
| bGHpA terminator sequence | 2519-2743 |
| PaqCI forward | 2755-2769 |
| attP site fragment | 2776-2797 |

TABLE Y5
Exemplary Ring20 parental vector plasmid (pRTx-3930)

| | |
|---|---|
| Name | pRTx-3930 |
| Type | Plasmid |
| Description | Ring20 minicircle parental plasmid |
| Length | 7378 bp |

(SEQ ID NO: 2653)
Annotations:

| Region/Element | Base range |
|---|---|
| Origin of replication (complement) | 1-589 |
| Ampicillin resistance gene promoter | |
| (complement) | 660-704 |
| rrnB T2 terminator (complement) | 724-751 |
| rrnB T1 terminator (complement) | 843-929 |
| 5S ribosomal RNA (complement) | 931-1046 |
| tnpA fragment CDS | 1159-1431 |
| Neomycin/kanamycin resistance gene CDS | 1463-2257 |
| attP site | 2344-2383 |
| PaqCI forward | 2390-2404 |
| bGHpA terminator sequence | 2416-2640 |
| WPRE | 2658-3246 |
| Factor Xa recognition and cleavage site CDS | 2764-2775 |
| eGFP CDS (complement) | 3260-3976 |
| Kozak sequence | 3973-3982 |
| Full CMV promoter | 4030-4599 |
| CMV promoter | 4031-4234 |
| CMV enhancer | 4235-4599 |
| CMV enhancer | 4235-4538 |
| Ring20 NCR | 4611-5627 |
| GC-rich region | 5489-5589 |
| PaqCI forward | 5628-5642 |
| attB site | 5643-5647 |
| attB site (complement) | 5648-5676 |
| araC fragment CDS | 6499-6789 |
| Rop fragment CDS | 6911-6951 |
| Bom | 7053-7193 |

TABLE Y6
Exemplary Ring20 minicircle post-recombination
by PhiC31 (pRTx-3930_MC)

| | |
|---|---|
| Name | pRTx-3930_MC |
| Type | Circular DNA |
| Description | Ring20 minicircle post recombination |
| Length | 3296 bp |

(SEQ ID NO: 2654)
Annotations:

| Region/Element | Base range |
|---|---|
| attB site | 1-10 |
| attB site | 11-15 |
| PaqCI forward | 16-30 |
| Ring20 NCR | 31-1047 |
| GC-rich region | 69-169 |
| Full CMV promoter | 1059-1628 |
| CMV enhancer | 1059-1423 |
| CMV enhancer | 1120-1423 |
| CMV promoter | 1424-1627 |
| Kozak sequence | 1676-1685 |
| eGFP CDS | 1682-2398 |
| WPRE | 2412-3000 |
| Factor Xa recognition and cleavage site | 2883-2894 |
| (complement) | |
| bGHpA terminator sequence | 3018-3242 |
| PaqCI forward | 3254-3268 |
| attP site fragment | 3275-3296 |

Conversion of Minicircles to cssDNA Genetic Elements

[2002] In some embodiments, circular double-stranded DNA molecules (e.g., minicircles) comprising the sequence of a genetic element (e.g., produced by a site-specific recombinase system as described herein) are converted to circular single-stranded DNA (cssDNA) molecules that can serve as genetic elements for Anelloviridae family vectors. In some embodiments, the circular double-stranded DNA molecule is contacted with a nicking enzyme that selectively introduces nicks into one strand of the DNA molecule and not the other strand. In some embodiments, at least 1 U of the nicking enzyme per μg of DNA is used. In some embodiments, the circular double-stranded DNA molecule is incubated with the nicking enzyme at 37° C. for 2.5 hours. The nicked double-stranded DNA molecule is then digested with an exonuclease that selectively digests nicked DNA strands, resulting in the degradation of the nicked strand and leaving the un-nicked DNA strand behind as a single-stranded DNA molecule. In some embodiments, at least 1 μl exonuclease per μg DNA is used. In some embodiments, the nicked double-stranded DNA molecule is incubated with the exonuclease at 25° C. for 30 minutes. In some embodiments, the exonuclease reaction is stopped by adding EDTA to 11 mM.

[2003] In some embodiments, the cssDNA molecule is isolated by phenol:chloroform extraction and ethanol precipitation. In some embodiments, one volume of a phenol:chloroform solution is added to the exonuclease-digested mixture. In some embodiments, the aqueous phase is aspirated from the top of the solution (e.g., the nucleic acid sample). In some embodiments, ₁/1₀th volume of 3M sodium acetate is added to the nucleic acid sample followed by 1 volume of 99% isopropanol and centrifugation for 30 minutes at 4° C. and 12,000×g. In some embodiments, the pellet is rinsed, air dried, and then dissolved in water.

[2004] The resulting product is a circular single-stranded DNA (cssDNA) molecule, which is the same structure as that of the viral genomes for Anelloviridae family viruses. Such cssDNA molecules can thus be genetic elements that are packaged into Anelloviridae family vector particles, e.g., by being encapsulated within a proteinaceous exterior comprising Anellovirus ORF1 molecules or CAV VP1 molecules (e.g., as described herein). In certain embodiments, the cssDNA is packaged into an Anelloviridae family vector particle via in vitro assembly, e.g., as described herein. In other embodiments, the cssDNA is introduced (e.g., transfected) into a host cell (e.g., a mammalian host cell) capable of expressing an Anellovirus ORF1 molecule or CAV VP1 molecule, and is packaged into an Anelloviridae family vector particle in the host cell.

[2005] In some embodiments, the sense strand of a circular double-stranded DNA molecule (e.g., minicircle) is digested and the antisense strand is left behind as a cssDNA. In some embodiments, the antisense strand of a circular double-stranded DNA molecule (e.g., minicircle) is digested and the sense strand is left behind as a cssDNA. In some embodiments, the nicking enzyme is an Nt.BsmAI enzyme (e.g., as described herein). In some embodiments, the nicking enzyme is Nt.BbvCI. In some embodiments, the nicking enzyme is Nb.BsrDI. In some embodiments, the nicking enzyme is Nb.BssSI. In some embodiments, the nicking enzyme is nicking Cas9. In some embodiments, the exonuclease is a T7 exonuclease (e.g., as described herein). In some embodiments, the exonuclease is λexo. In some embodiments, the exonuclease is ExoII. In some embodiments, the exonuclease is Exo VIII.

### Exemplary Site-Specific Recombinases and Recombinase Recognition Sites

[2006] The recombinase-based systems described herein utilize site-specific recombinases to induce recombination of vector plasmids at recombinase recognition sites, thereby producing double-stranded DNA molecules (e.g., minicircles) comprising the sequence between the recombinase recognition sites (e.g., comprising the sequence of a genetic element for an Anelloviridae family vector as described herein). In some embodiments, the site-specific recombinase is a serine recombinase. In some embodiments, the site-specific recombinase is a tyrosine recombinase. In some embodiments, the site-specific recombinase comprises a nuclear localization signal (NLS), e.g., an SV40 NLS. In some embodiments, the site-specific recombinase comprises an epitope tag (e.g., an HA tag, e.g., comprising the amino acid sequence YPYDVPDYA (SEQ ID NO: 2504).

[2007] In some embodiments, the site-specific recombinase comprises the amino acid sequence of a recombinase as listed in Table V2, or an amino acid sequence having at least 75%, 80%, 85%, 90%, 95%, 96%, 97%, 98%, or 99% identity thereto. In some embodiments, the site-specific recombinase comprises the amino acid sequence of SV40-NLS-iCre as listed in Table V2, or an amino acid sequence having at least 75%, 80%, 85%, 90%, 95%, 96%, 97%, 98%, or 99% identity thereto. In some embodiments, the site-specific recombinase comprises the amino acid sequence of SV40-NLS-HA_Bxb1 as listed in Table V2, or an amino acid sequence having at least 75%, 80%, 85%, 90%, 95%, 96%, 97%, 98%, or 99% identity thereto. In some embodiments, the site-specific recombinase comprises the amino acid sequence of Cre as listed in Table V2, or an amino acid sequence having at least 75%, 80%, 85%, 90%, 95%, 96%, 97%, 98%, or 99% identity thereto. In some embodiments, the site-specific recombinase comprises the amino acid sequence of Bxb1 as listed in Table V2, or an amino acid sequence having at least 75%, 80%, 85%, 90%, 95%, 96%, 97%, 98%, or 99% identity thereto. In some embodiments, the site-specific recombinase comprises the amino acid sequence of PhiC31 as listed in Table V2, or an amino acid sequence having at least 75%, 80%, 85%, 90%, 95%, 96%, 97%, 98%, or 99% identity thereto. In some embodiments, the site-specific recombinase comprises the amino acid sequence of ParA as listed in Table V2, or an amino acid sequence having at least 75%, 80%, 85%, 90%, 95%, 96%, 97%, 98%, or 99% identity thereto.

[2008] In some embodiments, the site-specific recombinase comprises a Cre recombinase (e.g., as described herein, e.g., in Table V2), or an amino acid sequence having at least 75%, 80%, 85%, 90%, 95%, 96%, 97%, 98%, or 99% identity thereto. In certain embodiments, at least one (e.g., one or both) of the recombinase recognition sites comprises a lox66 site as listed in Table V3, or a nucleic acid sequence having at least 75%, 80%, 85%, 90%, 95%, 96%, 97%, 98%, or 99% identity thereto. In certain embodiments, at least one (e.g., one or both) of the recombinase recognition sites comprises a lox71 site as listed in Table V3, or a nucleic acid sequence having at least 75%, 80%, 85%, 90%, 95%, 96%, 97%, 98%, or 99% identity thereto. In certain embodiments, a circular double-stranded nucleic acid molecule (e.g., minicircle) produced after a Cre recombination event (e.g., as described herein) comprises a loxP site as listed in Table V3, or a nucleic acid sequence having at least 75%, 80%, 85%, 90%, 95%, 96%, 97%, 98%, or 99% identity thereto. In certain embodiments, a circular double-stranded nucleic acid molecule (e.g., minicircle) produced after a Cre recombination event (e.g., as described herein) comprises a lox72 site as listed in Table V3, or a nucleic acid sequence having at least 75%, 80%, 85%, 90%, 95%, 96%, 97%, 98%, or 99% identity thereto.

[2009] In some embodiments, the site-specific recombinase comprises a Bxb1 recombinase (e.g., as described herein, e.g., in Table V2), or an amino acid sequence having at least 75%, 80%, 85%, 90%, 95%, 96%, 97%, 98%, or 99% identity thereto. In certain embodiments, at least one of the recombinase recognition sites comprises an attB site as listed in Table V4, or a nucleic acid sequence having at least 75%, 80%, 85%, 90%, 95%, 96%, 97%, 98%, or 99% identity thereto. In certain embodiments, at least one of the recombinase recognition sites comprises an attP site as listed in Table V4, or a nucleic acid sequence having at least 75%, 80%, 85%, 90%, 95%, 96%, 97%, 98%, or 99% identity thereto. In certain embodiments, one recombinase recognition site comprises an attB site as listed in Table V4, or a nucleic acid sequence having at least 75%, 80%, 85%, 90%, 95%, 96%, 97%, 98%, or 99% identity thereto, and the other recombinase recognition site comprises an attP site as listed in Table V4, or a nucleic acid sequence having at least 75%, 80%, 85%, 90%, 95%, 96%, 97%, 98%, or 99% identity thereto. In certain embodiments, a circular double-stranded nucleic acid molecule (e.g., minicircle) produced after a Bxb1 recombination event (e.g., as described herein) comprises an attL site as listed in Table V4, or a nucleic acid sequence having at least 75%, 80%, 85%, 90%, 95%, 96%, 97%, 98%, or 99% identity thereto. In certain embodiments, a circular double-stranded nucleic acid molecule (e.g., minicircle) produced after a Bxb1 recombination event (e.g., as described herein) comprises an attR site as listed in Table V4, or a nucleic acid sequence having at least 75%, 80%, 85%, 90%, 95%, 96%, 97%, 98%, or 99% identity thereto.

[2010] In some embodiments, the site-specific recombinase comprises a PhiC31 recombinase (e.g., as described herein, e.g., in Table V2), or an amino acid sequence having at least 75%, 80%, 85%, 90%, 95%, 96%, 97%, 98%, or 99% identity thereto. In certain embodiments, at least one of the recombinase recognition sites comprises an attB site as listed in Table V5, or a nucleic acid sequence having at least 75%, 80%, 85%, 90%, 95%, 96%, 97%, 98%, or 99% identity thereto. In certain embodiments, at least one of the recombinase recognition sites comprises an attP site as listed in Table V5, or a nucleic acid sequence having at least 75%, 80%, 85%, 90%, 95%, 96%, 97%, 98%, or 99% identity thereto. In certain embodiments, one recombinase recognition site comprises an attB site as listed in Table V5, or a nucleic acid sequence having at least 75%, 80%, 85%, 90%, 95%, 96%, 97%, 98%, or 99% identity thereto, and the other recombinase recognition site comprises an attP site as listed in Table V5, or a nucleic acid sequence having at least 75%, 80%, 85%, 90%, 95%, 96%, 97%, 98%, or 99% identity thereto. In certain embodiments, a circular double-stranded nucleic acid molecule (e.g., minicircle) produced after a PhiC31 recombination event (e.g., as described herein) comprises an attL site as listed in Table V5, or a nucleic acid sequence having at least 75%, 80%, 85%, 90%, 95%, 96%, 97%, 98%, or 99% identity thereto. In certain embodiments, a circular double-stranded nucleic acid molecule (e.g., minicircle) produced after a PhiC31 recombination event (e.g., as described herein) comprises a an attR site as listed in Table V5, or a nucleic acid sequence having at least 75%, 80%, 85%, 90%, 95%, 96%, 97%, 98%, or 99% identity thereto.

[2011] In some embodiments, the site-specific recombinase comprises a ParA resolvase (e.g., as described herein, e.g., in Table V2), or an amino acid sequence having at least 75%, 80%, 85%, 90%, 95%, 96%, 97%, 98%, or 99% identity thereto. In certain embodiments, at least one (e.g., one or both) of the recombinase recognition sites comprises an MRS sequence (e.g., the sequence of GGTCAAATTGGGTATACCCATTTGGGCCTAGTCTAGCCGGCATGGCGCATTACAGCAATACGCAATT TAAATGCGCCTAGCGCATTTTCCCGACCTTAATGCGCCTCGCGCTGTAGCCTCACGCCCACATATG; SEQ ID NO: 810), or a nucleic acid sequence having at least 75%, 80%, 85%, 90%, 95%, 96%, 97%, 98%, or 99% identity thereto. In certain embodiments, both of the recombinase recognition sites comprise an MRS sequence (e.g., the nucleic acid sequence of SEQ ID NO: 810), or a nucleic acid sequence having at least 75%, 80%, 85%, 90%, 95%, 96%, 97%, 98%, or 99% identity thereto. In certain embodiments, the recombinase recognition sites have the same sequence (e.g., an MRS sequence, e.g., comprising the nucleic acid sequence of SEQ ID NO: 810, or a nucleic acid sequence having at least 75%, 80%, 85%, 90%, 95%, 96%, 97%, 98%, or 99% identity thereto).

TABLE V2
Exemplary site-specific recombinase polypeptides

| Site-specific | Amino Acid Sequence |
|---|---|
| recombinase | (Underline = SV40 NLS sequence; bolded italics = HA tag sequence) |
| SV40- | MVPKKKRKVSNLLTVHQNLPALPVDATSDEVRKNLMDMFRDRQAFSEHTWKMLLSVCRS |
| NLS_iCre | WAAWCKLNNRKWFPAEPEDVRDYLLYLQARGLAVKTIQQHLGQLNMLHRRSGLPRPSDS |
| | NAVSLVMRRIRKENVDAGERAKQALAFERTDFDQVRSLMENSDRCQDIRNLAFLGIAYN |
| | TLLRIAEIARIRVKDISRTDGGRMLIHIGRTKTLVSTAGVEKALSLGVTKLVERWISVS |
| | GVADDPNNYLFCRVRKNGVAAPSATSQLSTRALEGIFEATHRLIYGAKDDSGQRYLAWS |
| | GHSARVGAARDMARAGVSIPEIMQAGGWTNVNIVMNYIRNLDSETGAMVRLLEDGD* |
| | (SEQ ID NO: 2655) |
| SV40-NLS- | MPKKKRKVYPYDVPDYAGSRALVVIRLSRVTDATTSPERQLESCQQLCAQRGWDVVGVA |
| HA_Bxb1 | EDLDVSGAVDPFDRKRRPNLARWLAFEEQPFDVIVAYRVDRLTRSIRHLQQLVHWAEDH |
| | KKLVVSATEAHFDTTTPFAAVVIALMGTVAQMELEAIKERNRSAAHFNIRAGKYRGSLP |
| | PWGYLPTRVDGEWRLVPDPVQRERILEVYHRVVDNHEPLHLVAHDLNRRGVLSPKDYFA |
| | QLQGREPQGREWSATALKRSMISEAMLGYATLNGKTVRDDDGAPLVRAEPILTREQLEA |
| | LRAELVKTSRAKPAVSTPSLLLRVLFCAVCGEPAYKFAGGGRKHPRYRCRSMGFPKHCG |
| | NGTVAMAEWDAFCEEQVLDLLGDAERLEKVWVAGSDSAVELAEVNAELVDLTSLIGSPA |
| | YRAGSPQREALDARIAALAARQEELEGLEARPSGWEWRETGQRFGDWWREQDTAAKNTW |
| | LRSMNVRLTFDVRGGLTRTIDFGDLQEYEQHLRLGSVVERLHTGMS* (SEQ ID NO: |
| | 2656) |
| Cre (same as | MSNLLTVHQNLPALPVDATSDEVRKNLMDMFRDRQAFSEHTWKMLLSVCRSWAAWCKLN |
| iCre) | NRKWFPAEPEDVRDYLLYLQARGLAVKTIQQHLGQLNMLHRRSGLPRPSDSNAVSLVMR |
| | RIRKENVDAGERAKQALAFERTDFDQVRSLMENSDRCQDIRNLAFLGIAYNTLLRIAEI |
| | ARIRVKDISRTDGGRMLIHIGRTKTLVSTAGVEKALSLGVTKLVERWISVSGVADDPNN |
| | YLFCRVRKNGVAAPSATSQLSTRALEGIFEATHRLIYGAKDDSGQRYLAWSGHSARVGA |
| | ARDMARAGVSIPEIMQAGGWTNVNIVMNYIRNLDSETGAMVRLLEDGD (SEQ ID NO: |
| | 2657) |
| Bxb1 | MRALVVIRLSRVTDATTSPERQLESCQQLCAQRGWDVVGVAEDLDVSGAVDPFDRKRRP |
| | NLARWLAFEEQPFDVIVAYRVDRLTRSIRHLQQLVHWAEDHKKLVVSATEAHFDTTTPF |
| | AAVVIALMGTVAQMELEAIKERNRSAAHFNIRAGKYRGSLPPWGYLPTRVDGEWRLVPD |
| | PVQRERILEVYHRVVDNHEPLHLVAHDLNRRGVLSPKDYFAQLQGREPQGREWSATALK |
| | RSMISEAMLGYATLNGKTVRDDDGAPLVRAEPILTREQLEALRAELVKTSRAKPAVSTP |
| | SLLLRVLFCAVCGEPAYKFAGGGRKHPRYRCRSMGFPKHCGNGTVAMAEWDAFCEEQVL |
| | DLLGDAERLEKVWVAGSDSAVELAEVNAELVDLTSLIGSPAYRAGSPQREALDARIAAL |
| | AARQEELEGLEARPSGWEWRETGQRFGDWWREQDTAAKNTWLRSMNVRLTFDVRGGLTR |
| | TIDFGDLQEYEQHLRLGSVVERLHTGMS (SEQ ID NO: 2658) |
| PhiC31 | MDTYAGAYDRQSRERENSSAASPATQRSANEDKAADLQREVERDGGRFRFVGHFSEAPG |
| | TSAFGTAERPEFERILNECRAGRLNMIIVYDVSRFSRLKVMDAIPIVSELLALGVTIVS |
| | TQEGVFRQGNVMDLIHLIMRLDASHKESSLKSAKILDTKNLQRELGGYVGGKAPYGFEL |
| | VSETKEITRNGRMVNVVINKLAHSTTPLTGPFEFEPDVIRWWWREIKTHKHLPFKPGSQ |
| | AAIHPGSITGLCKRMDADAVPTRGETIGKKTASSAWDPATVMRILRDPRIAGFAAEVIY |
| | KKKPDGTPTTKIEGYRIQRDPITLRPVELDCGPIIEPAEWYELQAWLDGRGRGKGLSRG |
| | QAILSAMDKLYCECGAVMTSKRGEESIKDSYRCRRRKVVDPSAPGQHEGTCNVSMAALD |
| | KFVAERIFNKIRHAEGDEETLALLWEAARRFGKLTEAPEKSGERANLVAERADALNALE |
| | ELYEDRAAGAYDGPVGRKHFRKQQAALTLRQQGAEERLAELEAAEAPKLPLDQWFPEDA |
| | DADPTGPKSWWGRASVDDKRVFVGLFVDKIVVTKSTTGRGQGTPIEKRASITWAKPPTD |
| | DDEDDAQDGTEDVAA (SEQ ID NO: 2659) |
| ParA | MATREQQPEGRRLKVARIYLRASTDEQNLERQESLVAATRAAGYYVAGIYREKASGARA |
| | DRPELLRMIADLQPGEVVVAEKIDRISRLPLAEAERLVASIRAKGAKLAVPGVVDLSEL |
| | AAEANGVAKIVLESVQDMLLKLALQMARDDYEDRRERQRQGVQLAKAAGRYTGRKRDAG |
| | MHDRIITLRSGGSSIAKTAKLVGCSPSQVKRVWAAWNAQQQK (SEQ ID NO: 2660) |

TABLE V3
Exemplary recombinase recognition sequences and recombinase hybrid sites for Cre
recombinases

| Recombinase | |
|---|---|
| Recognition Site Name | Nucleic acid sequence |
| loxP | ATAACTTCGTATAGCATACATTATACGAAGTTAT (SEQ ID |
| | NO: 2661) |
| lox66 | ATAACTTCGTATAGCATACATTATACGAACGGTA (SEQ ID |
| | NO: 2662) |
| lox71 | TACCGTTCGTATAGCATACATTATACGAAGTTAT (SEQ ID |
| | NO: 2663) |
| lox72 (hybrid) | TACCGTTCGTATAGCATACATTATACGAACGGTA (SEQ ID |
| | NO: 2664) |

TABLE V4
Exemplary recombinase recognition sequences for Bxb1 recombinases

| Recombinase | |
|---|---|
| Recognition | |
| Site Name | Nucleic acid sequence |
| attB | TCGGCCGGCTTGTCGACGACGGCGGTCTCCGTCGTCAGGATCATCCGGGC (SEQ ID |
| | NO: 2665) |
| attP | GTCGTGGTTTGTCTGGTCAACCACCGCGGTCTCAGTGGTGTACGGTACAAACCCCGAC |
| | (SEQ ID NO: 2666) |
| attL | TCGGCCGGCTTGTCGACGACGGCGGTCTCAGTGGTGTACGGTACAAACCCCGAC (SEQ |
| | ID NO: 2667) |
| attR | GTCGTGGTTTGTCTGGTCAACCACCGCGGTCTCCGTCGTCAGGATCATCCGGGC (SEQ |
| | ID NO: 2668) |

TABLE V5
Exemplary recombinase recognition sequences for PhiC31 recombinases

| Recombinase | |
|---|---|
| Recognition | |
| Site Name | Nucleic acid sequence |
| attB | TGCGGGTGCCAGGGCGTGCCCTTGGGCTCCCCGGGCGCGTACTCC (SEQ ID NO: |
| | 2669) |
| attP | GTGCCCCAACTGGGGTAACCTTTGAGTTCTCTCAGTTGGGGG (SEQ ID NO: 2670) |
| attL | TGCGGGTGCCAGGGCGTGCCCTTGAGTTCTCTCAGTTGGGGG (SEQ ID NO: 2671) |
| attR | TTGCCCCAACTGGGGTAACCTTTGGGCTCCCCGGGCGCGTACTCC (SEQ ID NO: 2672) |

[2012] In some embodiments, the site-specific recombinase comprises a polypeptide as listed in Table VR below. In certain embodiments, the recombinase recognition sites flanking the genetic element sequence comprise sequences recognized by the site-specific recombinase as listed in Table V1. In some embodiments, the site-specific recombinase is a ParA resolvase (e.g., as described herein). In some embodiments, the site-specific recombinase is an A118 recombinase. In some embodiments, the site-specific recombinase is a ΦFC1 recombinase. In some embodiments, the site-specific recombinase comprises a polypeptide as described in Turan et al. (2011, FASEB J. 25: 4088-4107; incorporated herein by reference in its entirety). In certain embodiments, the recombinase recognition sites flanking the genetic element sequence comprise sequences recognized by the site-specific recombinase as described in Turan et al., supra.

TABLE V1
Exemplary site-specific recombinases and their
cognate recombinase recognition sites

| | | | Target recognition |
|---|---|---|---|
| | | | sites |
| | Recombinase | | (spacer/crossover |
| Recombinase | Class | Source Species | [bp]) |
| Flp | Tyrosine | 2 μ (Saccharomyces | FRT (8/8) |
| | Recombinase | cerevisiae) | |
| R | Tyrosine | pSR1 (Zygosaccharomyces | RS (7/7) |
| | Recombinase | rouxii) | |
| Cre | Tyrosine | P1 phage (E. coli) | loxP (8/6) |
| | Recombinase | | |
| Dre, VCre | Tyrosine | Cre-variant(s) | rox, (4/4) VloxP, etc. |
| | Recombinase | | |
| λ | Tyrosine | λ phage (E. coli) | attP/attB → attL/attR |
| | Recombinase | | |
| HK022 | Tyrosine | HK022 phage (E. coli) | attP/attB → attL/attR |
| | Recombinase | | |
| HP1 | Tyrosine | Phage HP1 (Haemophilus) | attP/attB → attL/attR |
| | Recombinase | | |
| XerC/D | Tyrosine | E. coli | attP/attB → attL/attR |
| | Recombinase | | |
| γδ- res. | Serine | Tn1000 (E. coli) | attP/attB → attL/attR |
| | Recombinase | | |
| ParA resolvase | Serine | RK2/RP4 bact. plasmids | attP/attB → attL/attR |
| | Recombinase | (gram-) | |
| Tn3 | Serine | Tn3 transposon (E. coli) | attP/attB → attL/attR |
| | Recombinase | | |
| Gin | Serine | Salmonella | attP/attB → attL/attR |
| | Recombinase | | |
| ΦC31 | Serine | Φ31 phage (Streptomyces | attP/attB → attL/attR |
| | Recombinase | lividans) | |
| ΦBT1 | Serine | ΦBT1 phage | attP/attB → attL/attR |
| | Recombinase | (Streptomyces) | |
| Bxb1 | Serine | Bxb1 phage (Mycobact. | attP/attB → attL/attR |
| | Recombinase | smegmatis) | |
| R4 | Serine | Actinophage | attP/attB → attL/attR |
| | Recombinase | (Streptomyces parvulus) | |
| TP901-1 | Serine | TP901-1 phage | attP/attB → attL/attR |
| | Recombinase | (Lactococcus lactis) | |

### Genetic Element Constructs, e.g., for Assembly of Anellovectors

[2013] The genetic element of an anellovector as described herein may be produced from a genetic element construct that comprises a genetic element region and optionally other sequence such as vector backbone. Generally, the genetic element construct comprises an Anellovirus 5′ UTR (e.g., as described herein). A genetic element construct may be any nucleic acid construct suitable for delivery of the sequence of the genetic element into a host cell in which the genetic element can be enclosed within a proteinaceous exterior. In some embodiments, the genetic element construct comprises a promoter. In some embodiments, the genetic element construct is a linear nucleic acid molecule. In some embodiments, the genetic element construct is a circular nucleic acid molecule (e.g., a plasmid, bacmid, or a minicircle, e.g., as described herein). The genetic element construct may, in some embodiments, be double-stranded. In other embodiments, the genetic element is single-stranded. In some embodiments, the genetic element construct comprises DNA. In some embodiments, the genetic element construct comprises RNA. In some embodiments, the genetic element construct comprises one or more modified nucleotides.

[2014] In some aspects, the present disclosure provides a method for replication and propagation of the anellovector as described herein (e.g., in a cell culture system), which may comprise one or more of the following steps: (a) introducing (e.g., transfecting) a genetic element (e.g., linearized) into a cell line sensitive to anellovector infection; (b) harvesting the cells and optionally isolating cells showing the presence of the genetic element; (c) culturing the cells obtained in step (b) (e.g., for at least three days, such as at least one week or longer), depending on experimental conditions and gene expression; and (d) harvesting the cells of step (c), e.g., as described herein.

### Plasmids

[2015] In some embodiments, the genetic element construct is a plasmid. The plasmid will generally comprise the sequence of a genetic element as described herein as well as an origin of replication suitable for replication in a host cell (e.g., a bacterial origin of replication for replication in bacterial cells) and a selectable marker (e.g., an antibiotic resistance gene). In some embodiments, the sequence of the genetic element can be excised from the plasmid. In some embodiments, the plasmid is capable of replication in a bacterial cell. In some embodiments, the plasmid is capable of replication in a mammalian cell (e.g., a human cell). In some embodiments, a plasmid is at least 300, 400, 500, 600, 700, 800, 900, 1000, 2000, 3000, 4000, or 5000 bp in length. In some embodiments, the plasmid is less than 600, 700, 800, 900, 1000, 2000, 3000, 4000, 5000, 6000, 7000, 8000, 9000, or 10,000 bp in length. In some embodiments, the plasmid has a length between 300-400, 400-500, 500-600, 600-700, 700-800, 800-900, 900-1000, 1000-1500, 1500-2000, 2000-2500, 2500-3000, 3000-4000, or 4000-5000 bp. In some embodiments, the genetic element can be excised from a plasmid (e.g., by in vitro circularization), for example, to form a minicircle, e.g., as described herein. In embodiments, excision of the genetic element separates the genetic element sequence from the plasmid backbone (e.g., separates the genetic element from a bacterial backbone).

### Constructs Comprising Recombinase Recognition Sequences

[2016] In some embodiments, a genetic element construct (e.g., a plasmid) comprises a set of recombinase recognition sequences flanking the sequence of a genetic element of an Anelloviridae family vector as described herein. The recombinase recognition sites may be recognized by a site-specific recombinase as described herein. The remainder of the genetic element construct may, in some instances, comprise a vector backbone comprising elements for replication of the construct in a cell, such as a mammalian cell or a bacterial cell. Non-limiting examples of genetic element constructs comprising recombination recognition sites are provided in Tables Z1-Z18 and Y1-Y6 herein.

[2017] In some embodiments, the site-specific recombinase initiates a recombination event in the genetic element construct that separates the sequence of the genetic element from the remainder of the genetic element construct (e.g., the vector backbone). The recombination event may, in some embodiments, produce a small circular nucleic acid molecule (e.g., a minicircle) comprising the sequence of the genetic element. The minicircle may retain a scar at the site of recombination. In certain embodiments, the scar comprises a recombinase recognition sequence for the site-specific recombinase (e.g., a recombinase recognition sequence matching one of the recombinase recognition sequences in the original genetic element construct, or recombinase recognition sequence different from the recombinase recognition sequences in the original genetic element construct). In some embodiments, the remainder of the genetic element construct is also formed into a circular nucleic acid molecule after the recombination event (e.g., an empty vector backbone).

[2018] In some embodiments, the portion of the genetic element construct flanked by recombination recognition sites comprises, in order: (i) a 5′ NCR of an Anelloviridae family virus (e.g., Ring2, Ring19, Ring20, or CAV), or a nucleic acid sequence having at least 75%, 80%, 85%, 90%, 95%, 96%, 97%, 98%, or 99% identity thereto; (ii) a nucleic acid sequence encoding a transgene of interest; and (iii) a 3′ NCR of an Anelloviridae family virus (e.g., Ring2, Ring19, Ring20, or CAV), or a nucleic acid sequence having at least 75%, 80%, 85%, 90%, 95%, 96%, 97%, 98%, or 99% identity thereto.

[2019] In some embodiments, the portion of the genetic element construct flanked by recombination recognition sites comprises, in order: (i) a 3′ NCR of an Anelloviridae family virus (e.g., Ring2, Ring19, Ring20, or CAV), or a nucleic acid sequence having at least 75%, 80%, 85%, 90%, 95%, 96%, 97%, 98%, or 99% identity thereto; (ii) a 5′ NCR of an Anelloviridae family virus (e.g., Ring2, Ring19, Ring20, or CAV), or a nucleic acid sequence having at least 75%, 80%, 85%, 90%, 95%, 96%, 97%, 98%, or 99% identity thereto; and (iii) a nucleic acid sequence encoding a transgene of interest.

### Small Circular Nucleic Acid Constructs

[2020] In some embodiments, the genetic element construct is a circular nucleic acid construct, e.g., lacking a backbone (e.g., lacking a bacterial origin of replication and/or selectable marker). In embodiments, the genetic element construct is a double-stranded circular nucleic acid construct. In embodiments, the double-stranded circular nucleic acid construct is produced by in vitro circularization (IVC), e.g., as described herein. In embodiments, the double-stranded circular nucleic acid construct can be introduced into a host cell, in which it can be converted into or used as a template for generating single-stranded circular genetic elements, e.g., as described herein. In some embodiments, the circular nucleic acid construct does not comprise a plasmid backbone or a functional fragment thereof. In some embodiments, the circular nucleic acid construct is at least 2000, 2100, 2200, 2300, 2400, 2500, 2600, 2700, 2800, 2900, 3000, 3100, 3200, 3300, 3400, 3500, 3600, 3700, 3800, 3900, 4000, 4100, 4200, 4300, 4400, or 4500 bp in length. In some embodiments, the circular nucleic acid construct is less than 2900, 3000, 3100, 3200, 3300, 3400, 3500, 3600, 3700, 3800, 3900, 4000, 4100, 4200, 4300, 4400, 4500, 4600, 4700, 4800, 4900, 5000, 5500, or 6000 bp in length. In some embodiments, the circular nucleic acid construct is between 2000-2100, 2100-2200, 2200-2300, 2300-2400, 2400-2500, 2500-2600, 2600-2700, 2700-2800, 2800-2900, 2900-3000, 3000-3100, 3100-3200, 3200-3300, 3300-3400, 3400-3500, 3500-3600, 3600-3700, 3700-3800, 3800-3900, 3900-4000, 4000-4100, 4100-4200, 4200-4300, 4300-4400, or 4400-4500 bp in length. In some embodiments, the circular nucleic acid construct is a minicircle.

### Cis/Trans Constructs

[2021] In some embodiments, a genetic element construct as described herein comprises one or more sequences encoding one or more Anellovirus ORFs, e.g., proteinaceous exterior components (e.g., polypeptides encoded by an Anellovirus ORF1 nucleic acid, e.g., as described herein). For example, the genetic element construct may comprise a nucleic acid sequence encoding an Anellovirus ORF1 molecule. Such genetic element constructs can be suitable for introducing the genetic element and the Anellovirus ORF(s) into a host cell in cis. In other embodiments, a genetic element construct as described herein does not comprise sequences encoding one or more Anellovirus ORFs, e.g., proteinaceous exterior components (e.g., polypeptides encoded by an Anellovirus ORF1 nucleic acid, e.g., as described herein). For example, the genetic element construct may not comprise a nucleic acid sequence encoding an Anellovirus ORF1 molecule. Such genetic element constructs can be suitable for introducing the genetic element into a host cell, with the one or more Anellovirus ORFs to be provided in trans (e.g., via introduction of a second nucleic acid construct encoding one or more of the Anellovirus ORFs, or via an Anellovirus ORF cassette integrated into the genome of the host cell). In some embodiments, an ORF1 molecule is provided in trans, e.g., as described herein. In some embodiments, an ORF2 molecule is provided in trans, e.g., as described herein. In some embodiments, an ORF1 molecule and an ORF1 molecule are both provided in trans, e.g., as described herein.

[2022] In some embodiments, the genetic element construct comprises a sequence encoding an Anellovirus ORF1 molecule, or a splice variant or functional fragment thereof (e.g., a structural jelly-roll region, e.g., as described herein). In embodiments, the portion of the genetic element that does not comprise the sequence of the genetic element comprises the sequence encoding the Anellovirus ORF1 molecule, or splice variant or functional fragment thereof (e.g., in a cassette comprising a promoter and the sequence encoding the Anellovirus ORF1 molecule, or splice variant or functional fragment thereof). In further embodiments, the portion of the construct comprising the sequence of the genetic element comprises a sequence encoding an Anellovirus ORF1 molecule, or a splice variant or functional fragment thereof (e.g., a structural jelly-roll region, e.g., as described herein). In embodiments, enclosure of such a genetic element in a proteinaceous exterior (e.g., as described herein) produces a replication-component anellovector (e.g., an anellovector that upon infecting a cell, enables the cell to produce additional copies of the anellovector without introducing further nucleic acid constructs, e.g., encoding one or more Anellovirus ORFs as described herein, into the cell).

[2023] In other embodiments, the genetic element does not comprise a sequence encoding an Anellovirus ORF1 molecule, or a splice variant or functional fragment thereof (e.g., a structural jelly-roll region, e.g., as described herein). In embodiments, enclosure of such a genetic element in a proteinaceous exterior (e.g., as described herein) produces a replication-incompetent anellovector (e.g., an anellovector that, upon infecting a cell, does not enable the infected cell to produce additional anellovectors, e.g., in the absence of one or more additional constructs, e.g., encoding one or more Anellovirus ORFs as described herein).

### Expression Cassettes

[2024] In some embodiments, a genetic element construct comprises one or more cassettes for expression of a polypeptide or noncoding RNA (e.g., a miRNA or an siRNA). In some embodiments, the genetic element construct comprises a cassette for expression of an effector (e.g., an exogenous or endogenous effector), e.g., a polypeptide or noncoding RNA, as described herein. In some embodiments, the genetic element construct comprises a cassette for expression of an Anellovirus protein (e.g., an Anellovirus ORF1, ORF2, ORF2/2, ORF2/3, ORF1/1, or ORF1/2, or a functional fragment thereof). The expression cassettes may, in some embodiments, be located within the genetic element sequence. In embodiments, an expression cassette for an effector is located within the genetic element sequence. In embodiments, an expression cassette for an Anellovirus protein is located within the genetic element sequence. In other embodiments, the expression cassettes are located at a position within the genetic element construct outside of the sequence of the genetic element (e.g., in the backbone). In embodiments, an expression cassette for an Anellovirus protein is located at a position within the genetic element construct outside of the sequence of the genetic element (e.g., in the backbone).

[2025] A polypeptide expression cassette generally comprises a promoter and a coding sequence encoding a polypeptide, e.g., an effector (e.g., an exogenous or endogenous effector as described herein) or an Anellovirus protein (e.g., a sequence encoding an Anellovirus ORF1, ORF2, ORF2/2, ORF2/3, ORF1/1, or ORF1/2, or a functional fragment thereof). Exemplary promoters that can be included in an polypeptide expression cassette (e.g., to drive expression of the polypeptide) include, without limitation, constitutive promoters (e.g., CMV, RSV, PGK, EF1a, or SV40), cell or tissue-specific promoters (e.g., skeletal α-actin promoter, myosin light chain 2A promoter, dystrophin promoter, muscle creatine kinase promoter, liver albumin promoter, hepatitis B virus core promoter, osteocalcin promoter, bone sialoprotein promoter, CD2 promoter, immunoglobulin heavy chain promoter, T cell receptor a chain promoter, neuron-specific enolase (NSE) promoter, or neurofilament light-chain promoter), and inducible promoters (e.g., zinc-inducible sheep metallothionine (MT) promoter; the dexamethasone (Dex)-inducible mouse mammary tumor virus (MMTV) promoter; the T7 polymerase promoter system, tetracycline-repressible system, tetracycline-inducible system, RU486-inducible system, rapamycin-inducible system), e.g., as described herein. In some embodiments, the expression cassette further comprises an enhancer, e.g., as described herein.

### Design and Production of a Genetic Element Construct

[2026] Various methods are available for synthesizing a genetic element construct. For instance, the genetic element construct sequence may be divided into smaller overlapping pieces (e.g., in the range of about 100 bp to about 10 kb segments or individual ORFs) that are easier to synthesize. These DNA segments are synthesized from a set of overlapping single-stranded oligonucleotides. The resulting overlapping synthons are then assembled into larger pieces of DNA, e.g., the genetic element construct. The segments or ORFs may be assembled into the genetic element construct, e.g., by in vitro recombination or unique restriction sites at 5′ and 3′ ends to enable ligation.

[2027] The genetic element construct can be synthesized with a design algorithm that parses the construct sequence into oligo-length fragments, creating suitable design conditions for synthesis that take into account the complexity of the sequence space. Oligos are then chemically synthesized on semiconductor-based, high-density chips, where over 200,000 individual oligos are synthesized per chip. The oligos are assembled with an assembly techniques, such as BioFab®, to build longer DNA segments from the smaller oligos. This is done in a parallel fashion, so hundreds to thousands of synthetic DNA segments are built at one time.

[2028] Each genetic element construct or segment of the genetic element construct may be sequence verified. In some embodiments, high-throughput sequencing of RNA or DNA can take place using AnyDot.chips (Genovoxx, Germany), which allows for the monitoring of biological processes (e.g., miRNA expression or allele variability (SNP detection). Other high-throughput sequencing systems include those disclosed in Venter, J., et al. Science 16 Feb. 2001; Adams, M. et al, Science 24 Mar. 2000; and M. J, Levene, et al. Science 299:682-686, January 2003; as well as US Publication Application No. 20030044781 and 2006/0078937. Overall such systems involve sequencing a target nucleic acid molecule having a plurality of bases by the temporal addition of bases via a polymerization reaction that is measured on a molecule of nucleic acid, i.e., the activity of a nucleic acid polymerizing enzyme on the template nucleic acid molecule to be sequenced is followed in real time. In some embodiments, shotgun sequencing is performed.

[2029] A genetic element construct can be designed such that factors for replicating or packaging may be supplied in cis or in trans, relative to the genetic element. For example, when supplied in cis, the genetic element may comprise one or more genes encoding an Anellovirus ORF1, ORF1/1, ORF1/2, ORF2, ORF2/2, ORF2/3, or ORF2t/3, e.g., as described herein. In some embodiments, replication and/or packaging signals can be incorporated into a genetic element, for example, to induce amplification and/or encapsulation. In some embodiments, an effector is inserted into a specific site in the genome. In some embodiments, one or more viral ORFs are replaced with an effector.

[2030] In another example, when replication or packaging factors are supplied in trans, the genetic element may lack genes encoding one or more of an Anellovirus ORF1, ORF1/1, ORF1/2, ORF2, ORF2/2, ORF2/3, or ORF2t/3, e.g., as described herein; this protein or proteins may be supplied, e.g., by another nucleic acid, e.g., a helper nucleic acid. In some embodiments, minimal cis signals (e.g., 5′ UTR and/or GC-rich region) are present in the genetic element. In some embodiments, the genetic element does not encode replication or packaging factors (e.g., replicase and/or capsid proteins). Such factors may, in some embodiments, be supplied by one or more helper nucleic acids (e.g., a helper viral nucleic acid, a helper plasmid, or a helper nucleic acid integrated into the host cell genome). In some embodiments, the helper nucleic acids express proteins and/or RNAs sufficient to induce amplification and/or packaging, but may lack their own packaging signals. In some embodiments, the genetic element and the helper nucleic acid are introduced into the host cell (e.g., concurrently or separately), resulting in amplification and/or packaging of the genetic element but not of the helper nucleic acid.

[2031] In some embodiments, the genetic element construct may be designed using computer-aided design tools.

[2032] General methods of making constructs are described in, for example, Khudyakov & Fields, Artificial DNA: Methods and Applications, CRC Press (2002); in Zhao, Synthetic Biology: Tools and Applications, (First Edition), Academic Press (2013); and Egli & Herdewijn, Chemistry and Biology of Artificial Nucleic Acids, (First Edition), Wiley-VCH (2012).

### Effectors

[2033] The compositions and methods described herein can be used to produce a genetic element of an anellovector comprising a sequence encoding an effector (e.g., an exogenous effector or an endogenous effector), e.g., as described herein. The compositions and methods described herein can also be used to produce an anelloVLP comprising an effector (e.g., an exogenous effector or an endogenous effector), e.g., as described herein. The effector may be, in some instances, an endogenous effector or an exogenous effector. In some embodiments, the effector is a therapeutic effector. In some embodiments, the effector comprises a polypeptide (e.g., a therapeutic polypeptide or peptide, e.g., as described herein). In some embodiments, the effector comprises a non-coding RNA (e.g., an miRNA, siRNA, shRNA, mRNA, lncRNA, RNA, DNA, antisense RNA, or gRNA). In some embodiments, the effector comprises a regulatory nucleic acid, e.g., as described herein.

[2034] In some embodiments, the effector-encoding sequence may be inserted into the genetic element e.g., at a non-coding region, e.g., a noncoding region disposed 3′ of the open reading frames and 5′ of the GC-rich region of the genetic element, in the 5′ noncoding region upstream of the TATA box, in the 5′ UTR, in the 3′ noncoding region downstream of the poly-A signal, or upstream of the GC-rich region. In some embodiments, the effector-encoding sequence may be inserted into the genetic element, e.g., in a coding sequence (e.g., in a sequence encoding an Anellovirus ORF1, ORF1/1, ORF1/2, ORF2, ORF2/2, ORF2/3, and/or ORF2t/3, e.g., as described herein). In some embodiments, the effector-encoding sequence replaces all or a part of the open reading frame. In some embodiments, the genetic element comprises a regulatory sequence (e.g., a promoter or enhancer, e.g., as described herein) operably linked to the effector-encoding sequence.

[2035] In some embodiments, the effector comprises an intracellular agent (e.g., an intracellular polypeptide or intracellular nucleic acid), e.g., as described in PCT Publication No. WO 2020/123753 (incorporated herein by reference in its entirety.

[2036] In some embodiments, the effector comprises a secreted agent (e.g., a secreted polypeptide), e.g., as described in PCT Publication No. WO 2020/123773 (incorporated herein by reference in its entirety.

[2037] In some embodiments, the effector comprises a polypeptide that, when mutated, causes a disease or disorder, or a function variant of the polypeptide, e.g., as described in PCT Publication No. WO 2020/123795 (incorporated herein by reference in its entirety.

### Host Cells

[2038] The anellovectors described herein can be produced, for example, in a host cell. Generally, a host cell is provided that comprises an anellovector genetic element and the components of an anellovector proteinaceous exterior (e.g., a polypeptide encoded by an Anellovirus ORF1 nucleic acid or an Anellovirus ORF1 molecule). The host cell is then incubated under conditions suitable for enclosure of the genetic element within the proteinaceous exterior (e.g., culture conditions as described herein). In some embodiments, the host cell is further incubated under conditions suitable for release of the Anelloviridae family vector (e.g., anellovector) from the host cell, e.g., into the surrounding supernatant. In some embodiments, the host cell is lysed for harvest of Anelloviridae family vector (e.g., anellovector) from the cell lysate. In some embodiments, an Anelloviridae family vector (e.g., anellovector) may be introduced to a host cell line grown to a high cell density. In some embodiments, a host cell is a 293 cell, eg. an Expi-293 cell or a 293T cell. In some embodiments, a host cell is a MOLT-4 cell.

Introduction of Genetic Elements into Host Cells

[2039] The genetic element, or a nucleic acid construct comprising the sequence of a genetic element, may be introduced into a host cell. In some embodiments, the genetic element itself is introduced into the host cell. In some embodiments, a genetic element construct comprising the sequence of the genetic element (e.g., as described herein) is introduced into the host cell. A genetic element or genetic element construct can be introduced into a host cell, for example, using methods known in the art. For example, a genetic element or genetic element construct can be introduced into a host cell by transfection (e.g., stable transfection or transient transfection). In embodiments, the genetic element or genetic element construct is introduced into the host cell by lipofectamine transfection. In embodiments, the genetic element or genetic element construct is introduced into the host cell by calcium phosphate transfection. In some embodiments, the genetic element or genetic element construct is introduced into the host cell by electroporation. In some embodiments, the genetic element or genetic element construct is introduced into the host cell using a gene gun. In some embodiments, the genetic element or genetic element construct is introduced into the host cell by nucleofection. In some embodiments, the genetic element or genetic element construct is introduced into the host cell by PEI transfection. In some embodiments, the genetic element is introduced into the host cell by contacting the host cell with an Anelloviridae family vector (e.g., anellovector) comprising the genetic element. In some embodiments, cells are suspended in 2S Chica buffers.

[2040] In embodiments, the genetic element construct is capable of replication once introduced into the host cell. In embodiments, the genetic element can be produced from the genetic element construct once introduced into the host cell. In some embodiments, the genetic element is produced in the host cell by a polymerase, e.g., using the genetic element construct as a template.

[2041] In some embodiments, the genetic elements or vectors comprising the genetic elements are introduced (e.g., transfected) into cell lines that express a viral polymerase protein in order to achieve expression of the Anelloviridae family vector (e.g., anellovector). To this end, cell lines that express an Anelloviridae family vector (e.g., anellovector) polymerase protein may be utilized as appropriate host cells. Host cells may be similarly engineered to provide other viral functions or additional functions.

[2042] To prepare the Anelloviridae family vector (e.g., anellovector) disclosed herein, a genetic element construct may be used to transfect cells that provide Anelloviridae family vector (e.g., anellovector) proteins and functions required for replication and production. Alternatively, cells may be transfected with a second construct (e.g., a virus) providing Anelloviridae family vector (e.g., anellovector) proteins and functions before, during, or after transfection by the genetic element or vector comprising the genetic element disclosed herein. In some embodiments, the second construct may be useful to complement production of an incomplete viral particle. The second construct (e.g., virus) may have a conditional growth defect, such as host range restriction or temperature sensitivity, e.g., which allows the subsequent selection of transfectant viruses. In some embodiments, the second construct may provide one or more replication proteins utilized by the host cells to achieve expression of the Anelloviridae family vector (e.g., anellovector). In some embodiments, the host cells may be transfected with vectors encoding viral proteins such as the one or more replication proteins. In some embodiments, the second construct comprises an antiviral sensitivity.

[2043] The genetic element or vector comprising the genetic element disclosed herein can, in some instances, be replicated and produced into Anelloviridae family vectors (e.g., anellovectors) using techniques known in the art. For example, various viral culture methods are described, e.g., in U.S. Pat. Nos. 4,650,764; 5,166,057; 5,854,037; European Patent Publication EP 0702085A1; U.S. patent application Ser. No. 09/152,845; International Patent Publications PCT WO97/12032; WO96/34625; European Patent Publication EP-A780475; WO 99/02657; WO 98/53078; WO 98/02530; WO 99/15672; WO 98/13501; WO 97/06270; and EPO 780 47SA1, each of which is incorporated by reference herein in its entirety.

### Methods for Providing Protein(s) in Cis or Trans

[2044] In some embodiments (e.g., cis embodiments described herein), the genetic element construct further comprises one or more expression cassettes comprising a coding sequence for an Anellovirus ORF (e.g., an Anellovirus ORF1, ORF2, ORF2/2, ORF2/3, ORF1/1, or ORF1/2, or a functional fragment thereof). In embodiments, the genetic element construct comprises an expression cassette comprising a coding sequence for an Anellovirus ORF1, or a splice variant or functional fragment thereof. Such genetic element constructs, which comprise expression cassettes for the effector as well as the one or more Anellovirus ORFs, may be introduced into host cells. Host cells comprising such genetic element constructs may, in some instances, be capable of producing the genetic elements and components for proteinaceous exteriors, and for enclosure of the genetic elements within proteinaceous exteriors, without requiring additional nucleic acid constructs or integration of expression cassettes into the host cell genome. In other words, such genetic element constructs may be used for cis anellovector production methods in host cells, e.g., as described herein.

[2045] In some embodiments (e.g., trans embodiments described herein), the genetic element does not comprise an expression cassette comprising a coding sequence for one or more Anellovirus ORFs (e.g., an Anellovirus ORF1, ORF2, ORF2/2, ORF2/3, ORF1/1, or ORF1/2, or a functional fragment thereof). In embodiments, the genetic element construct does not comprise an expression cassette comprising a coding sequence for an Anellovirus ORF1, or a splice variant or functional fragment thereof. Such genetic element constructs, which comprise expression cassettes for the effector but lack expression cassettes for one or more Anellovirus ORFs (e.g., Anellovirus ORF1 or a splice variant or functional fragment thereof), may be introduced into host cells. Host cells comprising such genetic element constructs may, in some instances, require additional nucleic acid constructs or integration of expression cassettes into the host cell genome for production of one or more components of the anellovector (e.g., the proteinaceous exterior proteins). In some embodiments, host cells comprising such genetic element constructs are incapable of enclosure of the genetic elements within proteinaceous exteriors in the absence of an additional nucleic construct encoding an Anellovirus ORF1 molecule. In other words, such genetic element constructs may be used for trans anellovector production methods in host cells, e.g., as described herein.

[2046] In some embodiments (e.g., cis embodiments described herein), the genetic element construct further comprises one or more expression cassettes comprising a coding sequence for one or more non-Anellovirus ORF (e.g., a non-Anellovirus Rep molecule, e.g., an AAV Rep molecule, e.g., an AAV Rep protein, e.g., an AAV Rep2 protein). Such genetic element constructs, which comprise expression cassettes for the effector as well as the one or more non-Anellovirus ORFs, may be introduced into host cells. Host cells comprising such genetic element constructs may, in some instances, be capable of producing the genetic elements and components for proteinaceous exteriors, and for enclosure of the genetic elements within proteinaceous exteriors, without requiring additional nucleic acid constructs or integration of expression cassettes into the host cell genome. In other words, such genetic element constructs may be used for cis anellovector production methods in host cells, e.g., as described herein.

[2047] In some embodiments (e.g., trans embodiments described herein), the genetic element does not comprise an expression cassette comprising a coding sequence for one or more non-Anellovirus ORFs (e.g., a non-Anellovirus Rep molecule, e.g., an AAV Rep molecule, e.g., an AAV Rep protein, e.g., an AAV Rep2 protein). Such genetic element constructs, which comprise expression cassettes for the effector but lack expression cassettes for one or more non-Anellovirus ORFs (e.g., a non-Anellovirus Rep molecule, e.g., an AAV Rep molecule, e.g., an AAV Rep protein, e.g., an AAV Rep2 protein), may be introduced into host cells. Host cells comprising such genetic element constructs may, in some instances, require additional nucleic acid constructs or integration of expression cassettes into the host cell genome for production of one or more components of the anellovector (e.g., for replication of the genetic element). In some embodiments, host cells comprising such genetic element constructs are incapable of replicating the genetic elements in the absence of an additional nucleic construct, e.g., encoding a non-Anellovirus Rep molecule, e.g., an AAV Rep molecule, e.g., an AAV Rep protein, e.g., an AAV Rep2 protein. In other words, such genetic element constructs may be used for trans anellovector production methods in host cells, e.g., as described herein.

### Exemplary Cell Types

[2048] Exemplary host cells suitable for production of Anelloviridae family vector (e.g., anellovector) include, without limitation, mammalian cells, e.g., human cells and insect cells. In some embodiments, the host cell is a human cell or cell line. In some embodiments, the cell is an immune cell or cell line, e.g., a T cell or cell line, a cancer cell line, a hepatic cell or cell line, a neuron, a glial cell, a skin cell, an epithelial cell, a mesenchymal cell, a blood cell, an endothelial cell, an eye cell (e.g., a photoreceptor cell, a retinal cell, a cell of the posterior eye cup (PEC), retinal ganglion cell, a cell of the optic nerve, a cell of the optic nerve head, or a retinal pigmented epithelium (RPE) cell), a gastrointestinal cell, a progenitor cell, a precursor cell, a stem cell, a lung cell, a cardiac cell, or a muscle cell. In some embodiments, the host cell is an animal cell (e.g., a mouse cell, rat cell, rabbit cell, or hamster cell, or insect cell).

[2049] In some embodiments, the host cell is a mammalian cell (e.g., a human cell). In certain embodiments, a vector plasmid comprising a genetic element sequence flanked by recombinase recognition sites (e.g., lox sites or attB and attP sites, e.g., as described herein) is introduced into a mammalian host cell. In certain embodiments, the host cell comprises a site-specific recombinase (e.g., Cre or Bxb1, e.g., as described herein) capable of recombining the vector plasmid at the recombinase recognition sites, e.g., to produce a minicircle comprising the the genetic element sequence. In certain embodiments, the host cell further comprises a plasmid encoding the site-specific recombinase (e.g., the same plasmid as the vector plasmid or a different plasmid from the vector plasmid, e.g., as described herein). In certain embodiments, the host cell further comprises a rescue construct encoding one or more Anelloviridae family viral proteins (e.g., Anellovirus ORF1, ORF2, and/or ORF3; or CAV VP1, VP2, and/or VP3), e.g., an SRR plasmid as described herein. In certain embodiments, the minicircle is converted to a circular single-stranded DNA (cssDNA) comprising the sequence of the genetic element, e.g., in the host cell. In certain embodiments, the host cell comprises ORF1 molecules or VP1 molecules that can form a proteinaceous exterior encapsulating the cssDNA, thereby forming an Anelloviridae family vector particle.

[2050] In some embodiments, the host cell is a lymphoid cell. In some embodiments, the host cell is a T cell or an immortalized T cell. In embodiments, the host cell is a Jurkat cell. In embodiments, the host cell is a MOLT cell (e.g., a MOLT-4 or a MOLT-3 cell). In embodiments, the host cell is a MOLT-4 cell. In embodiments, the host cell is a MOLT-3 cell. In some embodiments, the host cell is an acute lymphoblastic leukemia (ALL) cell, e.g., a MOLT cell, e.g., a MOLT-4 or MOLT-3 cell. In some embodiments, the host cell is a B cell or an immortalized B cell. In some embodiments, the host cell comprises a genetic element construct (e.g., as described herein).

[2051] In some embodiments, the host cell is a MOLT cell (e.g., a MOLT-4 or a MOLT-3 cell).

[2052] In some embodiments, the host cell is an acute lymphoblastic leukemia (ALL) cell, e.g., a MOLT cell, e.g., a MOLT-4 or MOLT-3 cell.

[2053] In some embodiments, the host cell is a 293 cell (e.g., a HEK293 cell, a HEK293T cell, or an Expi-293 cell). In some embodiments, the host cell is an Expi-293F cell.

[2054] In an aspect, the present disclosure provides a method of manufacturing an Anelloviridae family vector (e.g., anellovector) comprising a genetic element enclosed in a proteinaceous exterior, the method comprising providing a Expi-293 cell comprising an Anelloviridae family vector (e.g., anellovector) genetic element, and incubating the Expi-293 cell under conditions that allow the Anelloviridae family vector (e.g., anellovector) genetic element to become enclosed in a proteinaceous exterior in the Expi-293 cell. In some embodiments, the Expi-293 cell further comprises one or more Anellovirus proteins (e.g., an Anellovirus ORF1 molecule) that form part or all of the proteinaceous exterior. In some embodiments, the Anelloviridae family vector (e.g., anellovector) genetic element is produced in the Expi-293 cell, e.g., from a genetic element construct (e.g., as described herein). In some embodiments, the method further comprises introducing the Anelloviridae family vector (e.g., anellovector) genetic element construct into the Expi-293 cell.

[2055] In an aspect, the present disclosure provides a method of manufacturing an Anelloviridae family vector (e.g., anellovector) comprising a genetic element enclosed in a proteinaceous exterior, the method comprising providing a MOLT-4 cell comprising an Anelloviridae family vector (e.g., anellovector) genetic element, and incubating the MOLT-4 cell under conditions that allow the Anelloviridae family vector (e.g., anellovector) genetic element to become enclosed in a proteinaceous exterior in the MOLT-4 cell. In some embodiments, the MOLT-4 cell further comprises one or more Anellovirus proteins (e.g., an Anellovirus ORF1 molecule) that form part or all of the proteinaceous exterior. In some embodiments, the Anelloviridae family vector (e.g., anellovector) genetic element is produced in the MOLT-4 cell, e.g., from a genetic element construct (e.g., as described herein). In some embodiments, the method further comprises introducing the Anelloviridae family vector (e.g., anellovector) genetic element construct into the MOLT-4 cell.

[2056] In an aspect, the present disclosure provides a method of manufacturing an Anelloviridae family vector (e.g., anellovector) comprising a genetic element enclosed in a proteinaceous exterior, the method comprising providing a MOLT-3 cell comprising an Anelloviridae family vector (e.g., anellovector) genetic element, and incubating the MOLT-3 cell under conditions that allow the Anelloviridae family vector (e.g., anellovector) genetic element to become enclosed in a proteinaceous exterior in the MOLT-3 cell. In some embodiments, the MOLT-3 cell further comprises one or more Anellovirus proteins (e.g., an Anellovirus ORF1 molecule) that form part or all of the proteinaceous exterior. In some embodiments, the Anelloviridae family vector (e.g., anellovector) genetic element is produced in the MOLT-3 cell, e.g., from a genetic element construct (e.g., as described herein). In some embodiments, the method further comprises introducing the Anelloviridae family vector (e.g., anellovector) genetic element construct into the MOLT-3 cell.

[2057] In some embodiments, the host cell is a human cell. In embodiments, the host cell is a HEK293T cell, HEK293F cell, A549 cell, Jurkat cell, Raji cell, Chang cell, HeLa cell Phoenix cell, MRC-5 cell, NCI-H292 cell, or Wi38 cell. In some embodiments, the host cell is a non-human primate cell (e.g., a Vero cell, CV-1 cell, or LLCMK2 cell). In some embodiments, the host cell is a murine cell (e.g., a McCoy cell). In some embodiments, the host cell is a hamster cell (e.g., a CHO cell or BHK 21 cell). In some embodiments, the host cell is a MARC-145, MDBK, RK-13, or EEL cell. In some embodiments, the host cell is an epithelial cell (e.g., a cell line of epithelial lineage).

[2058] In some embodiments, the Anelloviridae family vector (e.g., anellovector) is cultivated in continuous animal cell line (e.g., immortalized cell lines that can be serially propagated). According to one embodiment of the invention, the cell lines may include porcine cell lines. The cell lines envisaged in the context of the present invention include immortalised porcine cell lines such as, but not limited to the porcine kidney epithelial cell lines PK-15 and SK, the monomyeloid cell line 3D4/31 and the testicular cell line ST.

[2059] In some embodiments, the host cell is a bacterial cell (e.g., an E. coli cell). In certain embodiments, a vector plasmid comprising a genetic element sequence flanked by recombinase recognition sites (e.g., attB and attP sites as described herein) is introduced into a bacterial host cell. In certain embodiments, the bacterial host cell comprises a site-specific recombinase (e.g., PhiC31 as described herein) capable of recombining the vector plasmid at the recombinase recognition sites, e.g., to produce a minicircle comprising the the genetic element sequence. In certain embodiments, the site-specific recombinase is encoded in the bacterial genome. In other embodiments, the site-specific recombinase is encoded in a second plasmid in the host cell. In certain embodiments, the minicircle is isolated from the bacterial cell (e.g., using miniprep, midipre, or maxiprep methods known in the art).

### Culture Conditions

[2060] Host cells comprising a genetic element and components of a proteinaceous exterior can be incubated under conditions suitable for enclosure of the genetic element within the proteinaceous exterior, thereby producing an anellovector. Suitable culture conditions include those described, e.g., in any of Examples 14-16. In some embodiments, the host cells are incubated in liquid media (e.g., Grace's Supplemented (TNM-FH), IPL-41, TC-100, Schneider's Drosophila, SF-900 II SFM, or and EXPRESS-FIVET^{M} SFM). In some embodiments, the host cells are incubated in adherent culture. In some embodiments, the host cells are incubated in suspension culture. In some embodiments, the host cells are incubated in a tube, bottle, microcarrier, or flask. In some embodiments, the host cells are incubated in a dish or well (e.g., a well on a plate). In some embodiments, the host cells are incubated under conditions suitable for proliferation of the host cells. In some embodiments, the host cells are incubated under conditions suitable for the host cells to release Anelloviridae family vectors (e.g., anellovectors) produced therein into the surrounding supernatant.

[2061] The production of Anelloviridae family vector (e.g., anellovector)-containing cell cultures according to the present invention can be carried out in different scales (e.g., in flasks, roller bottles or bioreactors). The media used for the cultivation of the cells to be infected generally comprise the standard nutrients required for cell viability, but may also comprise additional nutrients dependent on the cell type. Optionally, the medium can be protein-free and/or serum-free. Depending on the cell type the cells can be cultured in suspension or on a substrate. In some embodiments, different media is used for growth of the host cells and for production of Anelloviridae family vectors (e.g., anellovectors).

### Harvest

[2062] Anelloviridae family vectors (e.g., anellovectors) produced by host cells can be harvested, e.g., according to methods known in the art. For example, Anelloviridae family vectors (e.g., anellovectors) released into the surrounding supernatant by host cells in culture can be harvested from the supernatant (e.g., as described in Example 14). In some embodiments, the supernatant is separated from the host cells to obtain the Anelloviridae family vectors (e.g., anellovectors). In some embodiments, the host cells are lysed before or during harvest. In some embodiments, the host cells are lysed in a detergent (e.g., Triton, e.g., 0.01%-0.1% Triton). In some embodiments, the Anelloviridae family vectors (e.g., anellovectors) are harvested from the host cell lysates (e.g., as described in Example 10 of PCT Publication No. WO 2020/123816, incorporated by reference herein in its entirety). In some embodiments, the Anelloviridae family vectors (e.g., anellovectors) are harvested from both the host cell lysates and the supernatant. In some embodiments, the purification and isolation of Anelloviridae family vectors (e.g., anellovectors) is performed according to known methods in virus production, for example, as described in Rinaldi, et al., DNA Vaccines: Methods and Protocols (Methods in Molecular Biology), 3rd ed. 2014, Humana Press (incorporated herein by reference in its entirety). In some embodiments, the Anelloviridae family vector (e.g., anellovector) may be harvested and/or purified by separation of solutes based on biophysical properties, e.g., ion exchange chromatography or tangential flow filtration, prior to formulation with a pharmaceutical excipient.

### In Vitro Assembly Methods for Anellovectors

[2063] An anellovector may be produced, e.g., by in vitro assembly, e.g., in the absence of a host cell, in a cell-free suspension, or in a supernatant. In some embodiments, the genetic element is contacted to an ORF1 molecule in vitro, e.g., under conditions that allow for assembly. In some embodiments, the genetic element is produced using a recombinase-based system as described herein. For example, circular double-stranded DNA minicircles comprising the sequence of a genetic element can be produced in bacterial cells by site-specific recombination of a vector plasmid (e.g., as described herein) comprising a genetic element sequence flanked by recombination recognition sites. Such minicircles can then be isolated from the bacterial cells (e.g., as described herein), and then converted to circular single stranded DNA (cssDNA) as described herein (e.g., by nicking one strand of the minicircle and selectively digesting the nicked strand, e.g., as described herein). This yields a cssDNA comprising the sequence of the genetic element, which can itself serve as a genetic element suitable for encapsulation within a proteinaceous exterior comprising Anelloviridae family viral capsid proteins (e.g., ORF1 molecules or VP1 molecules) to form an Anelloviridae family vector particle.

[2064] In an aspect, the present disclosure provides a particle (e.g., an anellovector as described herein) produced via in vitro assembly (e.g., as described herein). The particle may, in some instances, comprise a proteinaceous exterior comprising an ORF1 molecule and a genetic element encoding an exogenous effector, which is enclosed within the proteinaceous exterior. In some embodiments, a particle produced by in vitro assembly does not include a substantial (e.g., detectable) amount of one or more constituents (e.g., small molecules, peptides, polypeptides, nucleic acids, polynucleotides, lipids, sugars, and/or organelles) from a host cell (e.g., a host cell used to produce the ORF1 molecules and/or the genetic element). In some embodiments, the particle may have one or more (e.g., 1, 2, 3, 4, 5, 6, 7, 8, or all 9) of the following characteristics:
[2065] (i) the genetic element (e.g., a DNA genetic element) does not comprise an Anellovirus 5′ UTR and/or an Anellovirus origin of replication;
[2066] (ii) the sequence encoding the exogenous effector takes up at least 90%, 95%, 96%, 97%, 98%, 99% or 100% of the genetic element (e.g., a DNA genetic element);
[2067] (iii) the heterologous nucleic acid sequence takes up at least 90%, 95%, 96%, 97%, 98%, 99% or 100% of the genetic element (e.g., a DNA genetic element);
[2068] (iv) the particle does not comprise a detectable amount of (e.g., any) polypeptides from a host cell, or comprises less than 5, 10, 15, 20, 25, 30, 40, or 50 copies of a polypeptide from a host cell;
[2069] (v) the particle does not comprise a detectable amount of (e.g., any) nucleic acid molecules from a host cell other than the genetic element (or copies thereof), or comprises less than 2, 3, 4, or 5 copies of a nucleic acid molecule from a host cell;
[2070] (vi) the particle comprises a denaturant in a concentration of less than about 0.01M, 0.1M, 0.2M, 0.3M, 0.4M, 0.5M, 0.6M, 0.7M, 0.8M, 0.9M, 1M, 1.1M, 1.2M, 1.3M, 1.5M, 1.5M, 1.6M, 1.7M, 1.8M, 1.9M, or 2M;
[2071] (vii) does not substantially replicate when introduced into a cell (e.g., a human cell); and/or
[2072] (viii) has a symmetrical morphology and/or a diameter of at least 30, 31, 32, 33, 34, or 35 nm.

[2073] In another aspect, the disclosure provides a population of the particles (e.g., the anellovectors).

[2074] In some embodiments, Anellovirus proteins to be used for in vitro assembly of a particle (e.g., an anellovector) as described herein are produced in a cell. In some embodiments, baculovirus constructs are used to produce Anellovirus proteins (e.g., one or more of an Anellovirus ORF1, ORF2, and/or ORF3 molecule, e.g., as described herein), for example, in insect cells (e.g., Sf9 cells). Anelloviridae family virus (e.g., Anellovirus) proteins. These proteins may then be used, e.g., for in vitro assembly to encapsidate a genetic element, e.g., a genetic element comprising RNA. In some embodiments, a polynucleotide encoding one or more Anelloviridae family virus (e.g., Anellovirus) protein is fused to a promoter for expression in a host cell, e.g., an insect cell or an animal cell. In some embodiments, the polynucleotide is cloned into a baculovirus expression system. In some embodiments, a host cell, e.g., an insect cell, is infected with the baculovirus expression system and incubated for a period of time under conditions suitable for expression of the one or more Anellovirus proteins. In some embodiments, an infected cell is incubated for about 1, 2, 3, 4, 5, 10, 15, or 20 days. In some embodiments, an infected cell is lysed to recover the one or more Anellovirus proteins.

[2075] In some embodiments, an Anellovirus protein (e.g., an Anellovirus ORF1 molecule) is produced as described in Example 7. In some embodiments, an Anellovirus protein (e.g., an Anellovirus ORF1 molecule) is produced in insect cells as described in Example 8 or 10. In some embodiments, a plurality of Anellovirus ORF1 molecules has a propensity to self-assemble into a proteinaceous exterior, for example, to form a virus-like particle (VLP). In certain embodiments, the VLPs do not encapsulate a genetic element as described herein. In certain embodiments, the VLP comprises at least 40, 45, 50, 55, 60, 65, or 70 ORF1 molecules in its proteinaceous exterior.

[2076] In certain embodiments, a VLP comprising an Anellovirus ORF1 molecule can be denatured as described herein (e.g., using a chaotropic agent, such as urea). In embodiments, a VLP is denatured using one or more of: buffers of different pH, conditions of defined conductivity (salt content), a detergent (such as SDS (e.g., 0.1% SDS), Tween, Triton), a chaotropic agent (such as urea, e.g., as described herein), a high salt solution (e.g., a solution comprising NaCl, e.g., at a concentration of at least about 1M, e.g., at least about 0.5, 0.6, 0.7, 0.8, 0.9, 1.0, 1.1, 1.2, 1.3, 1.4, 1.5, 2, 3, 4, or 5M), or conditions involving defined temperature and time (reannealing temperatures), for example, as described in Example 12. In embodiments, a VLP is denatured using urea as described in Example 11. In embodiments, a VLP is denatured in urea at a concentration of about 1-10 M (e.g., about 1-2 M, 2-3 M, 3-4 M, 4-5 M, 5-6 M, 6-7 M, 7-8 M, 8-9 M, 9-10M, or 1-6 M). In embodiments, a VLP is denatured in urea at a concentration of about 1-10 M (e.g., about 1, 2, 3, 4, 5, 6, 7, 8, 9, or 10M). In an embodiment, a VLP is denatured in urea at a concentration of 2 M. In embodiments, a VLP is denatured under high salt conditions. In embodiments, denaturation of the VLP results in the ORF1 molecules forming capsomers (e.g., capsomeric decamers comprising about 10 copies of the ORF1 molecule).

[2077] In some embodiments, removing the capsomers from the presence of the chaotropic agent (e.g., by purifying the capsomers or removing the chaotropic agent, e.g., by dilution or dialysis) allows the ORF1 molecules to reform VLPs (e.g., VLPs comprising at least 40, 45, 50, 55, 60, 65, or 70 ORF1 molecules). In embodiments, VLPs are reformed by dialyzing out a chaotropic agent (e.g., urea) as described in Example 11. In some embodiments, VLPs are reformed in the presence of a cargo of interest, such as a genetic element (e.g., as described herein), under conditions suitable for enclosure of the cargo in the proteinaceous exterior of the VLP (e.g., as described in Example 12). In some embodiments, an isolated Anellovirus protein (e.g., an ORF1 molecule) is purified (e.g., from a cell). In some embodiments, an Anellovirus protein is purified using purification techniques including but not limited to chelating purification, heparin purification, gradient sedimentation purification, and/or SEC purification. In embodiments, an Anellovirus protein is purified as described in Example 7. In some embodiments, an Anellovirus protein (e.g., an Anellovirus ORF1 molecule) is purified from insect cells as described in Example 8 or 10. In some embodiments, a purified Anellovirus protein is mixed with a genetic element to encapsidate the genetic element, e.g., a genetic element comprising RNA. In some embodiments, a genetic element is encapisdated using an ORF1 protein, ORF2 protein, or modified version thereof. In some embodiments two nucleic acids are encapsidated. For instance, the first nucleic acid may be an mRNA e.g., chemically modified mRNA, and the second nucleic acid may be DNA.

[2078] In some embodiments, DNA encoding Anellovirus ORF1 (e.g., wildtype ORF1 protein, ORF1 proteins harboring mutations, e.g., to improve assembly efficiency, yield or stability, chimeric ORF1 protein, or fragments thereof) are expressed in insect cell lines (e.g., Sf9 and/or HighFive), animal cell lines (e.g., chicken cell lines (MDCC)), bacterial cells (e.g., E. coli) and/or mammalian cell lines (e.g., 293expi and/or MOLT4). In some embodiments, DNA encoding Anellovirus ORF1 may be untagged. In some embodiments, DNA encoding Anellovirus ORF1 may contain tags fused N-terminally and/or C-terminally. In some embodiments, DNA encoding Anellovirus ORF1 may harbor mutations, insertions or deletions within the ORF1 protein to introduce a tag, e.g., to aid in purification and/or identity determination, e.g., through immunostaining assays (including but not limited to ELISA or Western Blot). In some embodiments, DNA encoding Anellovirus ORF1 may be expressed alone or in combination with any number of helper proteins. In some embodiments, DNA encoding Anellovirus ORF1 is expressed in combination with Anellovirus ORF2 and/or ORF3 proteins.

[2079] In some embodiments, ORF1 proteins harboring mutations to improve assembly efficiency may include, but are not limited to, ORF1 proteins that harbor mutations introduced into the N-terminal Arginine Arm (ARG arm) to alter the pI of the ARG arm permitting pH sensitive nucleic acid binding to trigger particle assembly (SEQ ID 3-5). In some embodiments, ORF1 proteins harboring mutations that improve stability may include mutations to an interprotomer contacting beta strands F and G of the canonical structural jellyroll beta-barrel to alter hydrophobic state of the protomer surface and improve thermodynamic favorability of capsid formation.

[2080] In some embodiments, chimeric ORF1 proteins may include, but are not limited to, ORF1 proteins which have a portion or portions of their sequence replaced with comparable portions from another capsid protein, e.g., Beak and Feather Disease Virus (BFDV) capsid protein, or Hepatitis E capsid protein, e.g., ARG arm or F and G beta strands of Ring 9 ORF1 replaced with the comparable components from BFDV capsid protein. In some embodiments, chimeric ORF1 proteins may also include ORF1 proteins which have a portion or portions of their sequence replaced with comparable portions of another Anellovirus ORF1 protein (e.g., structural jellyroll fragments or the C-terminal portion of Ring 2 ORF1 replaced with comparable portions of Ring 9 ORF1.

[2081] In some embodiments, a genetic element to be used for in vitro assembly of a particle (e.g., an anellovector) as described herein are produced in a cell. In some embodiments, a cell is transfected with a construct (e.g., a plasmid, tandem construct, and/or an in vitro circularized nucleic acid molecule, e.g., as described herein) comprising the sequence of a genetic element. In embodiments, the cell is incubated under conditions suitable for replication of the construct. In embodiments, the cell is incubated under conditions suitable for production and/or replication of the genetic element (e.g., from the construct). In embodiments, the cell is lysed to recover the genetic element. In some embodiments, a genetic element to be used for in vitro assembly is a DNA, e.g., a single-stranded DNA (ssDNA). In embodiments, the genetic element is a negative sense ssDNA (e.g., generated as described in Example 6). In some embodiments, a genetic element to be used for in vitro assembly comprises RNA (e.g., an mRNA), for example, as described in Example 12. In some embodiments, a genetic element to be used for in vitro assembly comprises RNA (e.g., an mRNA) and the ORF1 molecule of the proteinaceous exterior comprises one or more contact residues that binds RNA (e.g., a domain from an RNA-binding protein, e.g., an mRNA-binding protein, e.g., MS2 coat protein), for example, as described in Example 12. In some embodiments, a genetic element to be used for in vitro assembly comprises RNA (e.g., an mRNA) and DNA (e.g., a DNA portion comprising a sequence that binds to an Anellovirus ORF1 molecule), for example, as described in Example 12. In certain embodiments, the RNA portion of the genetic element is covalently bound to the DNA portion of the genetic element. In certain embodiments, the RNA portion of the genetic element is hybridized to the DNA portion of the genetic element. In embodiments, the RNA portion of the genetic element comprises a region capable of hybridizing to (e.g., complementary to) at least a subsequence of the DNA portion of the genetic element.

[2082] In some embodiments, the present disclosure describes a method of making an anellovector, the method comprising: (a) providing a mixture comprising: (i) a genetic element (e.g., a genetic element comprising DNA and/or RNA), and (ii) an ORF1 molecule; and (b) incubating the mixture under conditions suitable for enclosing the genetic element within a proteinaceous exterior comprising the ORF1 molecule, thereby making an anellovector; wherein the mixture is not comprised in a cell. In some embodiments, the anellovector is assembled in vitro as described in Example 7. In some embodiments, the method further comprises, prior to the providing of (a), expressing the ORF1 molecule, e.g., in a host cell (e.g., an insect cell or a mammalian cell). In some embodiments, the expressing comprises incubating a host cell (e.g., an insect cell or a mammalian cell) comprising a nucleic acid molecule (e.g., a baculovirus expression vector) encoding the ORF1 molecule under conditions suitable for producing the ORF1 molecule. In some embodiments, the method further comprises, prior to the providing of (a), purifying the ORF1 molecule expressed by the host cell. In some embodiments, the method is performed in a cell-free system. In some embodiments, the present disclosure describes a method of manufacturing an anellovector composition, comprising: (a) providing a plurality of anellovectors or compositions according to any of the preceding embodiments; (b) optionally evaluating the plurality for one or more of: a contaminant described herein, an optical density measurement (e.g., OD 260), particle number (e.g., by HPLC), infectivity (e.g., particle:infectious unit ratio, e.g., as determined by fluorescence and/or ELISA); and (c) formulating the plurality of anellovectors, e.g., as a pharmaceutical composition suitable for administration to a subject, e.g., if one or more of the parameters of (b) meet a specified threshold.

In Vitro Assembly Methods for anelloVLPs

[2083] An anelloVLP as described herein may be produced, e.g., by in vitro assembly, e.g., in a cell-free suspension or in a supernatant. In some embodiments, the anelloVLP is produced by contacting a plurality of ORF1 molecules (e.g., in capsomers) to an effector (e.g., an exogenous effector) in vitro, e.g., under conditions that allow for assembly. In some embodiments, the plurality of ORF1 molecules enclose the effector in a proteinaceous exterior. In some embodiments, the effector is attached to the exterior surface of a proteinaceous exterior formed from the plurality of ORF1 molecules (e.g., as a surface moiety as described herein). In some embodiments, production of an anelloVLP comprises expressing a plurality of ORF1 molecules in a cell, purifying the plurality of ORF1 molecules, denaturing virus-like particles formed by the ORF1 molecules (e.g., as described herein), and then allowing the ORF1 molecules to reform virus-like particles in the presence of an effector (e.g., an exogenous effector), thereby forming anelloVLPs comprising the ORF1 molecules enclosing the effector.

[2084] In an aspect, the present disclosure provide a particle (e.g., an anelloVLP as described herein) produced via in vitro assembly (e.g., as described herein). The particle may, in some instances, comprise a proteinaceous exterior comprising an ORF1 molecule and an effector (e.g., an exogenous effector), e.g., as described herein. In some embodiments, the effector is enclosed within the proteinaceous exterior. In some embodiments, the effector is comprised in a surface moiety (e.g., as described herein) attached to the exterior surface of the proteinaceous exterior. In some embodiments, a particle produced by in vitro assembly does not include a substantial (e.g., detectable) amount of one or more constituents (e.g., small molecules, peptides, polypeptides, nucleic acids, polynucleotides, lipids, sugars, and/or organelles) from a host cell (e.g., a host cell used to produce the ORF1 molecules and/or the genetic element). In some embodiments, the particle may have one or more (e.g., 1, 2, 3, 4, or all 5) of the following characteristics:
[2085] (i) does not comprise (e.g., does not enclose) a polynucleotide,
[2086] (ii) does not comprise (e.g., does not enclose) detectable levels of polynucleotides,
[2087] (iii) does not comprise (e.g., does not enclose) a polynucleotide of greater than 1000, 500, 200, or 100 nucleotides in length,
[2088] (iv) does not comprise (e.g., does not enclose) a polynucleotide comprising any contiguous nucleic acid sequences of at least 50, 100, 150, 200, 300, 400, 500, 600, 700, 800, 900, or 1000 nucleotides in length having least 75%, 80%, 85%, 90%, 95%, 96%, 97%, 98%, 99%, or 100% sequence identity to contiguous sequence in a wild-type Anellovirus genome (e.g., as described herein), and/or
[2089] (v) does not comprise a polynucleotide comprising an Anellovirus 5′ UTR or an origin of replication.

[2090] In another aspect, the disclosure provides a population of the particles (e.g., the anelloVLPs). In some embodiments, the population further comprises one or more anellovectors. In some embodiments, the population does not comprise anellovectors.

[2091] In some embodiments, Anellovirus proteins to be used for in vitro assembly of a particle (e.g., an anelloVLP) as described herein are produced in a cell. In some embodiments, baculovirus constructs are used to produce Anellovirus proteins (e.g., one or more of an Anellovirus ORF1, ORF2, and/or ORF3 molecule, e.g., as described herein), for example, in insect cells (e.g., Sf9 cells). These proteins may then be used, e.g., for in vitro assembly to form an anelloVLP, e.g., as described herein. In some embodiments, a polynucleotide encoding one or more Anellovirus proteins is fused to a promoter for expression in a host cell, e.g., an insect cell or an animal cell. In some embodiments, the polynucleotide is cloned into a baculovirus expression system. In some embodiments, a host cell, e.g., an insect cell, is infected with the baculovirus expression system and incubated for a period of time under conditions suitable for expression of the one or more Anellovirus proteins. In some embodiments, an infected cell is incubated for about 1, 2, 3, 4, 5, 10, 15, or 20 days. In some embodiments, an infected cell is lysed to recover the one or more Anellovirus proteins.

[2092] In some embodiments, an Anellovirus protein (e.g., an Anellovirus ORF1 molecule) is produced as described in Example 7. In some embodiments, an Anellovirus protein (e.g., an Anellovirus ORF1 molecule) is produced in insect cells as described in Example 8 or 10. In some embodiments, a plurality of Anellovirus ORF1 molecules has a propensity to self-assemble into a proteinaceous exterior, for example, to form a virus-like particle (VLP). In certain embodiments, the VLPs do not encapsulate a genetic element as described herein. In certain embodiments, the VLPs do not encapsulate an effector to be delivered to a target cell, e.g., as described herein. In certain embodiments, the VLP comprises at least 40, 45, 50, 55, 60, 65, or 70 ORF1 molecules in its proteinaceous exterior.

[2093] In certain embodiments, a VLP comprising an Anellovirus ORF1 molecule can be denatured as described herein (e.g., using a chaotropic agent, such as urea). In embodiments, a VLP is denatured using one or more of: buffers of different pH, conditions of defined conductivity (salt content), a detergent (such as SDS (e.g., 0.1% SDS), Tween, Triton), a chaotropic agent (such as urea, e.g., as described herein), a high salt solution (e.g., a solution comprising NaCl, e.g., at a concentration of at least about 1M, e.g., at least about 0.5, 0.6, 0.7, 0.8, 0.9, 1.0, 1.1, 1.2, 1.3, 1.4, 1.5, 2, 3, 4, or 5M), or conditions involving defined temperature and time (reannealing temperatures), for example, as described in Example 12. In embodiments, a VLP is denatured using urea as described in Example 11. In embodiments, a VLP is denatured in urea at a concentration of about 1-10 M (e.g., about 1-2 M, 2-3 M, 3-4 M, 4-5 M, 5-6 M, 6-7 M, 7-8 M, 8-9 M, 9-10M, or 1-6 M). In embodiments, a VLP is denatured in urea at a concentration of about 1-10 M (e.g., about 1, 2, 3, 4, 5, 6, 7, 8, 9, or 10M). In an embodiment, a VLP is denatured in urea at a concentration of 2 M. In embodiments, a VLP is denatured under high salt conditions. In embodiments, denaturation of the VLP results in the ORF1 molecules forming capsomers (e.g., capsomeric decamers comprising about 10 copies of the ORF1 molecule).

[2094] In some embodiments, removing the capsomers from the presence of the chaotropic agent (e.g., by purifying the capsomers or removing the chaotropic agent, e.g., by dilution or dialysis) allows the ORF1 molecules to reform VLPs (e.g., VLPs comprising at least 40, 45, 50, 55, 60, 65, or 70 ORF1 molecules). In embodiments, VLPs are reformed by dialyzing out a chaotropic agent (e.g., urea) as described in Example 11. In some embodiments, VLPs are reformed in the presence of a cargo of interest (e.g., an effector as described herein), for example, under conditions suitable for enclosure of the cargo in the proteinaceous exterior of the VLP (e.g., as described in Example 12). In some embodiments, an isolated Anellovirus protein (e.g., an ORF1 molecule) is purified (e.g., from a cell). In some embodiments, an Anellovirus protein is purified using purification techniques including but not limited to chelating purification, heparin purification, gradient sedimentation purification, and/or SEC purification. In embodiments, an Anellovirus protein is purified as described in Example 7. In some embodiments, an Anellovirus protein (e.g., an Anellovirus ORF1 molecule) is purified from insect cells as described in Example 8 or 10. In some embodiments, a plurality of purified Anellovirus proteins are mixed with an effector. In embodiments, the purified Anellovirus proteins encapsulated the effector. In some embodiments, the effector is encapsulated using an ORF1 protein, ORF2 protein, or modified version thereof.

[2095] In some embodiments, DNA encoding Anellovirus ORF1 (e.g., wildtype ORF1 protein, ORF1 proteins harboring mutations, e.g., to improve assembly efficiency, yield or stability, chimeric ORF1 protein, or fragments thereof) are expressed in insect cell lines (e.g., Sf9 and/or HighFive), animal cell lines (e.g., chicken cell lines (MDCC)), bacterial cells (e.g., E. coli) and/or mammalian cell lines (e.g., 293expi and/or MOLT4). In some embodiments, DNA encoding Anellovirus ORF1 may be untagged. In some embodiments, DNA encoding Anellovirus ORF1 may contain tags fused N-terminally and/or C-terminally. In some embodiments, DNA encoding Anellovirus ORF1 may harbor mutations, insertions or deletions within the ORF1 protein to introduce a tag, e.g., to aid in purification and/or identity determination, e.g., through immunostaining assays (including but not limited to ELISA or Western Blot). In some embodiments, DNA encoding Anellovirus ORF1 may be expressed alone or in combination with any number of helper proteins. In some embodiments, DNA encoding Anellovirus ORF1 is expressed in combination with Anellovirus ORF2 and/or ORF3 proteins.

[2096] In some embodiments, ORF1 proteins harboring mutations to improve assembly efficiency may include, but are not limited to, ORF1 proteins that harbor mutations introduced into the N-terminal Arginine Arm (ARG arm) to alter the pI of the ARG arm permitting pH sensitive nucleic acid binding to trigger particle assembly (SEQ ID 3-5). In some embodiments, ORF1 proteins harboring mutations that improve stability may include mutations to an interprotomer contacting beta strands F and G of the canonical structural jellyroll beta-barrel to alter hydrophobic state of the protomer surface and improve thermodynamic favorability of capsid formation.

[2097] In some embodiments, chimeric ORF1 proteins may include, but are not limited to, ORF1 proteins which have a portion or portions of their sequence replaced with comparable portions from another capsid protein, e.g., Beak and Feather Disease Virus (BFDV) capsid protein, or Hepatitis E capsid protein, e.g., ARG arm or F and G beta strands of Ring 9 ORF1 replaced with the comparable components from BFDV capsid protein. In some embodiments, chimeric ORF1 proteins may also include ORF1 proteins which have a portion or portions of their sequence replaced with comparable portions of another Anellovirus ORF1 protein (e.g., structural jellyroll fragments or the C-terminal portion of Ring 2 ORF1 replaced with comparable portions of Ring 9 ORF1.

[2098] In some embodiments, the present disclosure describes a method of making an anelloVLP, the method comprising: (a) providing a mixture comprising: (i) an effector (e.g., an exogenous effector), and (ii) an ORF1 molecule; and (b) incubating the mixture under conditions suitable for enclosing the effector within a proteinaceous exterior comprising the ORF1 molecule, thereby making an anelloVLP; wherein the mixture is not comprised in a cell. In some embodiments, the anelloVLP is assembled in vitro as described in Example 7. In some embodiments, the method further comprises, prior to the providing of (a), expressing the ORF1 molecule, e.g., in a host cell (e.g., an insect cell or a mammalian cell). In some embodiments, the expressing comprises incubating a host cell (e.g., an insect cell or a mammalian cell) comprising a nucleic acid molecule (e.g., a baculovirus expression vector) encoding the ORF1 molecule under conditions suitable for producing the ORF1 molecule. In some embodiments, the method further comprises, prior to the providing of (a), purifying the ORF1 molecule expressed by the host cell. In some embodiments, the method is performed in a cell-free system. In some embodiments, the present disclosure describes a method of manufacturing an anelloVLP composition, comprising: (a) providing a plurality of anelloVLPs or compositions according to any of the preceding embodiments; (b) optionally evaluating the plurality for one or more of: a contaminant described herein, an optical density measurement (e.g., OD 260), particle number (e.g., by HPLC), infectivity (e.g., particle:infectious unit ratio, e.g., as determined by fluorescence and/or ELISA); and (c) formulating the plurality of anelloVLPs, e.g., as a pharmaceutical composition suitable for administration to a subject, e.g., if one or more of the parameters of (b) meet a specified threshold.

### Enrichment and Purification

[2099] Anellovectors or anelloVLPs produced as described herein can be further purified and/or enriched, e.g., to produce an anellovector preparation or an anelloVLP preparation, respectively. In some embodiments, the harvested anellovectors or anelloVLPs are isolated from other constituents or contaminants present in the harvest solution, e.g., using methods known in the art for purifying viral particles (e.g., purification by sedimentation, chromatography, and/or ultrafiltration). In some embodiments, the purification steps comprise removing one or more of serum, host cell DNA, host cell proteins, particles lacking the genetic element, and/or phenol red from the preparation. In some embodiments, the harvested anellovectors or anelloVLPs are enriched relative to other constituents or contaminants present in the harvest solution, e.g., using methods known in the art for enriching viral particles.

[2100] In some embodiments, the resultant preparation or a pharmaceutical composition comprising the preparation will be stable over an acceptable period of time and temperature, and/or be compatible with the desired route of administration and/or any devices this route of administration will require, e.g., needles or syringes.

### III. Vectors

[2101] The genetic element described herein may be included in a vector. Suitable vectors as well as methods for their manufacture and their use are well known in the prior art.

[2102] In one aspect, the invention includes a vector comprising a genetic element comprising (i) a sequence encoding a non-pathogenic exterior protein, (ii) an exterior protein binding sequence that binds the genetic element to the non-pathogenic exterior protein, and (iii) a sequence encoding a regulatory nucleic acid.

[2103] The genetic element or any of the sequences within the genetic element can be obtained using any suitable method. Various recombinant methods are known in the art, such as, for example screening libraries from cells harboring viral sequences, deriving the sequences from a vector known to include the same, or isolating directly from cells and tissues containing the same, using standard techniques. Alternatively or in combination, part or all of the genetic element can be produced synthetically, rather than cloned.

[2104] In some embodiments, the vector includes regulatory elements, nucleic acid sequences homologous to target genes, and various reporter constructs for causing the expression of reporter molecules within a viable cell and/or when an intracellular molecule is present within a target cell.

[2105] Reporter genes are used for identifying potentially transfected cells and for evaluating the functionality of regulatory sequences. In general, a reporter gene is a gene that is not present in or expressed by the recipient organism or tissue and that encodes a polypeptide whose expression is manifested by some easily detectable property, e.g., enzymatic activity. Expression of the reporter gene is assayed at a suitable time after the DNA has been introduced into the recipient cells. Suitable reporter genes may include genes encoding luciferase, beta-galactosidase, chloramphenicol acetyl transferase, secreted alkaline phosphatase, or the green fluorescent protein gene (e.g., Ui-Tei et al., 2000 FEBS Letters 479: 79-82). Suitable expression systems are well known and may be prepared using known techniques or obtained commercially. In general, the construct with the minimal 5′ flanking region showing the highest level of expression of reporter gene is identified as the promoter. Such promoter regions may be linked to a reporter gene and used to evaluate agents for the ability to modulate promoter-driven transcription.

[2106] In some embodiments, the vector is substantially non-pathogenic and/or substantially non-integrating in a host cell or is substantially non-immunogenic in a host.

[2107] In some embodiments, the vector is in an amount sufficient to modulate one or more of phenotype, virus levels, gene expression, compete with other viruses, disease state, etc. at least about 5%, 10%, 15%, 20%, 25%, 30%, 35%, 40%, 45%, 50%, or more.

### IV. Compositions

[2108] An anellovector or or anelloVLP described herein may also be included in pharmaceutical compositions with a pharmaceutical excipient, e.g., as described herein. In some embodiments, the pharmaceutical composition comprises at least 10⁵, 10⁶, 10⁷, 10⁸, 10⁹, 10¹⁰, 10¹¹, 10¹², 10¹³, 10¹⁴, or 10¹⁵ anellovectors or anelloVLPs. In some embodiments, the pharmaceutical composition comprises about 10⁵-10¹⁵, 10⁵-10¹⁰, or 10¹⁰-10¹⁵ anellovectors or anelloVLPs. In some embodiments, the pharmaceutical composition comprises about 10⁸ (e.g., about 10⁵, 10⁶, 10⁷, 10⁸, 10⁹, or 10¹⁰) genomic equivalents/mL of the anellovector or anelloVLP. In some embodiments, the pharmaceutical composition comprises 10⁵-10¹⁰, 10⁶-10¹⁰, 10⁷-10¹⁰, 10⁸-10¹⁰, 10⁹-10¹⁰, 10⁵-10⁶, 10⁵-10⁷, 10⁵-10⁸, 10⁵-10⁹, 10⁵-10¹¹, 10⁵-10¹², 10⁵-10¹³, 10⁵-10¹⁴, 10⁵-10¹⁵, or 10¹⁰-10¹⁵ genomic equivalents/mL of the anellovector or anelloVLP. In some embodiments, the pharmaceutical composition comprises sufficient anellovectors or anelloVLPs to deliver at least 1, 2, 5, or 10, 100, 500, 1000, 2000, 5000, 8,000, 1×10⁴, 1×10⁵, 1×10⁶, 1×10⁷ or greater copies of a genetic element comprised in the anellovectors or anelloVLPs per cell to a population of the eukaryotic cells. In some embodiments, the pharmaceutical composition comprises sufficient anellovectors or anelloVLPs to deliver at least about 1×10⁴, 1×10⁵, 1×10⁶, 1× or 10⁷, or about 1×10⁴-1×10⁵, 1×10⁴-1×10⁶, 1×10⁴-1×10⁷, 1×10⁵-1×10⁶, 1×10⁵-1×10⁷, or 1×10⁶-1×10⁷ copies of a genetic element comprised in the anellovectors or anelloVLPs per cell to a population of the eukaryotic cells.

[2109] In some embodiments, the pharmaceutical composition has one or more of the following characteristics: the pharmaceutical composition meets a pharmaceutical or good manufacturing practices (GMP) standard; the pharmaceutical composition was made according to good manufacturing practices (GMP); the pharmaceutical composition has a pathogen level below a predetermined reference value, e.g., is substantially free of pathogens; the pharmaceutical composition has a contaminant level below a predetermined reference value, e.g., is substantially free of contaminants; or the pharmaceutical composition has low immunogenicity or is substantially non-immunogenic, e.g., as described herein.

[2110] In some embodiments, the pharmaceutical composition comprises below a threshold amount of one or more contaminants. Exemplary contaminants that are desirably excluded or minimized in the pharmaceutical composition include, without limitation, host cell nucleic acids (e.g., host cell DNA and/or host cell RNA), animal-derived components (e.g., serum albumin or trypsin), replication-competent viruses, non-infectious particles, free viral capsid protein, adventitious agents, and aggregates. In embodiments, the contaminant is host cell DNA. In embodiments, the composition comprises less than about 10 ng of host cell DNA per dose. In embodiments, the level of host cell DNA in the composition is reduced by filtration and/or enzymatic degradation of host cell DNA. In embodiments, the pharmaceutical composition consists of less than 10% (e.g., less than about 10%, 5%, 4%, 3%, 2%, 1%, 0.5%, or 0.1%) contaminant by weight.

[2111] In one aspect, the invention described herein includes a pharmaceutical composition comprising:
[2112] a) an Anelloviridae family vector (e.g., anellovector) comprising a genetic element comprising (i) a sequence encoding a non-pathogenic exterior protein, (ii) an exterior protein binding sequence that binds the genetic element to the non-pathogenic exterior protein, and (iii) a sequence encoding a regulatory nucleic acid; and a proteinaceous exterior that is associated with, e.g., envelops or encloses, the genetic element; and
[2113] b) a pharmaceutical excipient.

[2114] In one aspect, the invention described herein includes a pharmaceutical composition comprising:
[2115] a) an anelloVLP as described herein; and
[2116] b) a pharmaceutical excipient.

### Vesicles

[2117] In some embodiments, the composition further comprises a carrier component, e.g., a microparticle, liposome, vesicle, or exosome. In some embodiments, liposomes comprise spherical vesicle structures composed of a uni- or multilamellar lipid bilayer surrounding internal aqueous compartments and a relatively impermeable outer lipophilic phospholipid bilayer. Liposomes may be anionic, neutral or cationic. Liposomes are generally biocompatible, nontoxic, can deliver both hydrophilic and lipophilic drug molecules, protect their cargo from degradation by plasma enzymes, and transport their load across biological membranes (see, e.g., Spuch and Navarro, Journal of Drug Delivery, vol. 2011, Article ID 469679, 12 pages, 2011. doi:10.1155/2011/469679 for review).

[2118] Vesicles can be made from several different types of lipids; however, phospholipids are most commonly used to generate liposomes as drug carriers. Vesicles may comprise without limitation DOTMA, DOTAP, DOTIM, DDAB, alone or together with cholesterol to yield DOTMA and cholesterol, DOTAP and cholesterol, DOTIM and cholesterol, and DDAB and cholesterol. Methods for preparation of multilamellar vesicle lipids are known in the art (see for example U.S. Pat. No. 6,693,086, the teachings of which relating to multilamellar vesicle lipid preparation are incorporated herein by reference). Although vesicle formation can be spontaneous when a lipid film is mixed with an aqueous solution, it can also be expedited by applying force in the form of shaking by using a homogenizer, sonicator, or an extrusion apparatus (see, e.g., Spuch and Navarro, Journal of Drug Delivery, vol. 2011, Article ID 469679, 12 pages, 2011. doi:10.1155/2011/469679 for review). Extruded lipids can be prepared by extruding through filters of decreasing size, as described in Templeton et al., Nature Biotech, 15:647-652, 1997, the teachings of which relating to extruded lipid preparation are incorporated herein by reference.

[2119] As described herein, additives may be added to vesicles to modify their structure and/or properties. For example, either cholesterol or sphingomyelin may be added to the mixture to help stabilize the structure and to prevent the leakage of the inner cargo. Further, vesicles can be prepared from hydrogenated egg phosphatidylcholine or egg phosphatidylcholine, cholesterol, and dicetyl phosphate. (see, e.g., Spuch and Navarro, Journal of Drug Delivery, vol. 2011, Article ID 469679, 12 pages, 2011. doi:10.1155/2011/469679 for review). Also, vesicles may be surface modified during or after synthesis to include reactive groups complementary to the reactive groups on the recipient cells. Such reactive groups include without limitation maleimide groups. As an example, vesicles may be synthesized to include maleimide conjugated phospholipids such as without limitation DSPE-MaL-PEG2000.

[2120] A vesicle formulation may be mainly comprised of natural phospholipids and lipids such as 1,2-distearoryl-sn-glycero-3-phosphatidyl choline (DSPC), sphingomyelin, egg phosphatidylcholines and monosialoganglioside. Formulations made up of phospholipids only are less stable in plasma. However, manipulation of the lipid membrane with cholesterol reduces rapid release of the encapsulated cargo or 1,2-dioleoyl-sn-glycero-3-phosphoethanolamine (DOPE) increases stability (see, e.g., Spuch and Navarro, Journal of Drug Delivery, vol. 2011, Article ID 469679, 12 pages, 2011. doi:10.1155/2011/469679 for review).

[2121] In embodiments, lipids may be used to form lipid microparticles. Lipids include, but are not limited to, DLin-KC2-DMA4, C12-200 and colipids disteroylphosphatidyl choline, cholesterol, and PEG-DMG may be formulated (see, e.g., Novobrantseva, Molecular Therapy-Nucleic Acids (2012) 1, e4; doi:10.1038/mtna.2011.3) using a spontaneous vesicle formation procedure. The component molar ratio may be about 50/10/38.5/1.5 (DLin-KC2-DMA or C12-200/disteroylphosphatidyl choline/cholesterol/PEG-DMG). Tekmira has a portfolio of approximately 95 patent families, in the U.S. and abroad, that are directed to various aspects of lipid microparticles and lipid microparticles formulations (see, e.g., U.S. Pat. Nos. 7,982,027; 7,799,565; 8,058,069; 8,283,333; 7,901,708; 7,745,651; 7,803,397; 8,101,741; 8,188,263; 7,915,399; 8,236,943 and 7,838,658 and European Pat. Nos. 1766035; 1519714; 1781593 and 1664316), all of which may be used and/or adapted to the present invention.

[2122] In some embodiments, microparticles comprise one or more solidified polymer(s) that is arranged in a random manner. The microparticles may be biodegradable. Biodegradable microparticles may be synthesized, e.g., using methods known in the art including without limitation solvent evaporation, hot melt microencapsulation, solvent removal, and spray drying. Exemplary methods for synthesizing microparticles are described by Bershteyn et al., Soft Matter 4:1787-1787, 2008 and in US 2008/0014144 A1, the specific teachings of which relating to microparticle synthesis are incorporated herein by reference.

[2123] Exemplary synthetic polymers which can be used to form biodegradable microparticles include without limitation aliphatic polyesters, poly (lactic acid) (PLA), poly (glycolic acid) (PGA), co-polymers of lactic acid and glycolic acid (PLGA), polycarprolactone (PCL), polyanhydrides, poly(ortho)esters, polyurethanes, poly(butyric acid), poly(valeric acid), and poly(lactide-co-caprolactone), and natural polymers such as albumin, alginate and other polysaccharides including dextran and cellulose, collagen, chemical derivatives thereof, including substitutions, additions of chemical groups such as for example alkyl, alkylene, hydroxylations, oxidations, and other modifications routinely made by those skilled in the art), albumin and other hydrophilic proteins, zein and other prolamines and hydrophobic proteins, copolymers and mixtures thereof. In general, these materials degrade either by enzymatic hydrolysis or exposure to water, by surface or bulk erosion.

[2124] The microparticles' diameter ranges from 0.1-1000 micrometers (μm). In some embodiments, their diameter ranges in size from 1-750 μm, or from 50-500 μm, or from 100-250 μm. In some embodiments, their diameter ranges in size from 50-1000 μm, from 50-750 μm, from 50-500 μm, or from 50-250 μm. In some embodiments, their diameter ranges in size from 0.05-1000 μm, from 10-1000 μm, from 100-1000 μm, or from 500-1000 μm. In some embodiments, their diameter is about 0.5 μm, about 10 μm, about 50 μm, about 100 μm, about 200 μm, about 300 μm, about 350 μm, about 400 μm, about 450 μm, about 500 μm, about 550 μm, about 600 μm, about 650 μm, about 700 μm, about 750 μm, about 800 μm, about 850 μm, about 900 μm, about 950 μm, or about 1000 μm. As used in the context of microparticle diameters, the term “about” means+/−5% of the absolute value stated.

[2125] In some embodiments, a ligand is conjugated to the surface of the microparticle via a functional chemical group (carboxylic acids, aldehydes, amines, sulfhydryls and hydroxyls) present on the surface of the particle and present on the ligand to be attached. Functionality may be introduced into the microparticles by, for example, during the emulsion preparation of microparticles, incorporation of stabilizers with functional chemical groups.

[2126] Another example of introducing functional groups to the microparticle is during post-particle preparation, by direct crosslinking particles and ligands with homo- or heterobifunctional crosslinkers. This procedure may use a suitable chemistry and a class of crosslinkers (CDI, EDAC, glutaraldehydes, etc. as discussed in more detail below) or any other crosslinker that couples ligands to the particle surface via chemical modification of the particle surface after preparation. This also includes a process whereby amphiphilic molecules such as fatty acids, lipids or functional stabilizers may be passively adsorbed and adhered to the particle surface, thereby introducing functional end groups for tethering to ligands.

[2127] In some embodiments, the microparticles may be synthesized to comprise one or more targeting groups on their exterior surface to target a specific cell or tissue type (e.g., cardiomyocytes). These targeting groups include without limitation receptors, ligands, antibodies, and the like. These targeting groups bind their partner on the cells' surface. In some embodiments, the microparticles will integrate into a lipid bilayer that comprises the cell surface and the mitochondria are delivered to the cell.

[2128] The microparticles may also comprise a lipid bilayer on their outermost surface. This bilayer may be comprised of one or more lipids of the same or different type. Examples include without limitation phospholipids such as phosphocholines and phosphoinositols. Specific examples include without limitation DMPC, DOPC, DSPC, and various other lipids such as those described herein for liposomes.

[2129] In some embodiments, the carrier comprises nanoparticles, e.g., as described herein.

[2130] In some embodiments, the vesicles or microparticles described herein are functionalized with a diagnostic agent. Examples of diagnostic agents include, but are not limited to, commercially available imaging agents used in positron emissions tomography (PET), computer assisted tomography (CAT), single photon emission computerized tomography, x-ray, fluoroscopy, and magnetic resonance imaging (MRI); and contrast agents. Examples of suitable materials for use as contrast agents in MRI include gadolinium chelates, as well as iron, magnesium, manganese, copper, and chromium.

### Carriers

[2131] A composition (e.g., pharmaceutical composition) described herein may comprise, be formulated with, and/or be delivered in, a carrier. In one aspect, the invention includes a composition, e.g., a pharmaceutical composition, comprising a carrier (e.g., a vesicle, a liposome, a lipid nanoparticle, an exosome, a red blood cell, an exosome (e.g., a mammalian or plant exosome), a fusosome) comprising (e.g., encapsulating) a composition described herein (e.g., an anellovector, anelloVLP, Anellovirus, or genetic element described herein).

[2132] In some embodiments, the compositions and systems described herein can be formulated in liposomes or other similar vesicles. Generally, liposomes are spherical vesicle structures composed of a uni- or multilamellar lipid bilayer surrounding internal aqueous compartments and a relatively impermeable outer lipophilic phospholipid bilayer. Liposomes may be anionic, neutral or cationic. Liposomes generally have one or more (e.g., all) of the following characteristics: biocompatibility, nontoxicity, can deliver both hydrophilic and lipophilic drug molecules, can protect their cargo from degradation by plasma enzymes, and can transport their load across biological membranes and the blood brain barrier (BBB) (see, e.g., Spuch and Navarro, Journal of Drug Delivery, vol. 2011, Article ID 469679, 12 pages, 2011. doi:10.1155/2011/469679; and Zylberberg & Matosevic. 2016. Drug Delivery, 23:9, 3319-3329, doi: 10.1080/10717544.2016.1177136).

[2133] Vesicles can be made from several different types of lipids; however, phospholipids are most commonly used to generate liposomes as drug carriers. Methods for preparation of multilamellar vesicle lipids are known (see, for example, U.S. Pat. No. 6,693,086, the teachings of which relating to multilamellar vesicle lipid preparation are incorporated herein by reference). Although vesicle formation can be spontaneous when a lipid film is mixed with an aqueeous solution, it can also be expedited by applying force in the form of shaking by using a homogenizer, sonicator, or an extrusion apparatus (see, e.g., Spuch and Navarro, Journal of Drug Delivery, vol. 2011, Article ID 469679, 12 pages, 2011. doi:10.1155/2011/469679 for review). Extruded lipids can be prepared by, e.g., extruding through filters of decreasing size, as described in Templeton et al., Nature Biotech, 15:647-652, 1997.

[2134] Lipid nanoparticles (LNPs) are another example of a carrier that provides a biocompatible and biodegradable delivery system for the pharmaceutical compositions described herein. See, e.g., Gordillo-Galeano et a1. European Journal of Pharmaceutics and Biopharmaceutics. Volume 133, December 2018, Pages 285-308. Nanostructured lipid carriers (NLCs) are modified solid lipid nanoparticles (SLNs) that retain the characteristics of the SLN, improve drug stability and loading capacity, and prevent drug leakage. Polymer nanoparticles (PNPs) are an important component of drug delivery. These nanoparticles can effectively direct drug delivery to specific targets and improve drug stability and controlled drug release. Lipid-polymer nanoparticles (PLNs), a new type of carrier that combines liposomes and polymers, may also be employed. These nanoparticles possess the complementary advantages of PNPs and liposomes. A PLN is composed of a core-shell structure; the polymer core provides a stable structure, and the phospholipid shell offers good biocompatibility. As such, the two components increase the drug encapsulation efficiency rate, facilitate surface modification, and prevent leakage of water-soluble drugs. For a review, see, e.g., Li et al. 2017, Nanomaterials 7, 122; doi:10.3390/nano7060122.

[2135] Exosomes can also be used as drug delivery vehicles for the compositions and systems described herein. For a review, see Ha et al. July 2016. Acta Pharmaceutica Sinica B. Volume 6, Issue 4, Pages 287-296; doi.org/10.1016/j.apsb.2016.02.001.

[2136] Ex vivo differentiated red blood cells can also be used as a carrier for a composition described herein. See, e.g., WO2015073587; WO2017123646; WO2017123644; WO2018102740; WO2016183482; WO2015153102; WO2018151829; WO2018009838; Shi et al. 2014. Proc Natl Acad Sci USA. 111(28): 10131-10136; U.S. Pat. No. 9,644,180; Huang et al. 2017. Nature Communications 8: 423; Shi et al. 2014. Proc Natl Acad Sci USA. 111(28): 10131-10136.

[2137] Fusosome compositions, e.g., as described in WO2018208728, can also be used as carriers to deliver a composition described herein.

### Membrane Penetrating Polypeptides

[2138] In some embodiments, the composition further comprises a membrane penetrating polypeptide (MPP) to carry the components into cells or across a membrane, e.g., cell or nuclear membrane. Membrane penetrating polypeptides that are capable of facilitating transport of substances across a membrane include, but are not limited to, cell-penetrating peptides (CPPs)(see, e.g., U.S. Pat. No. 8,603,966), fusion peptides for plant intracellular delivery (see, e.g., Ng et al., PLoS One, 2016, 11:e0154081), protein transduction domains, Trojan peptides, and membrane translocation signals (MTS) (see, e.g., Tung et al., Advanced Drug Delivery Reviews 55:281-294 (2003)). Some MPP are rich in amino acids, such as arginine, with positively charged side chains.

[2139] Membrane penetrating polypeptides have the ability of inducing membrane penetration of a component and allow macromolecular translocation within cells of multiple tissues in vivo upon systemic administration. A membrane penetrating polypeptide may also refer to a peptide which, when brought into contact with a cell under appropriate conditions, passes from the external environment in the intracellular environment, including the cytoplasm, organelles such as mitochondria, or the nucleus of the cell, in amounts significantly greater than would be reached with passive diffusion.

[2140] Components transported across a membrane may be reversibly or irreversibly linked to the membrane penetrating polypeptide. A linker may be a chemical bond, e.g., one or more covalent bonds or non-covalent bonds. In some embodiments, the linker is a peptide linker. Such a linker may be between 2-30 amino acids, or longer. The linker includes flexible, rigid or cleavable linkers.

### Combinations

[2141] In one aspect, the anellovector, anelloVLP, or composition described herein may also include one or more heterologous moieties. In one aspect, the anellovector or composition comprising an anellovector or anelloVLP described herein may also include one or more heterologous moiety in a fusion. In some embodiments, a heterologous moiety may be linked with the genetic element. In some embodiments, a heterologous moiety may be enclosed in the proteinaceous exterior as part of the anellovector or anelloVLP. In some embodiments, a heterologous moiety may be administered with the anellovector or anelloVLP.

[2142] In one aspect, the invention includes a cell or tissue comprising any one of the anellovectors or anelloVLP and heterologous moieties described herein.

[2143] In another aspect, the invention includes a pharmaceutical composition comprising an anellovector or anelloVLP and the heterologous moiety described herein.

[2144] In some embodiments, the heterologous moiety may be a virus (e.g., an effector (e.g., a drug, small molecule), a targeting agent (e.g., a DNA targeting agent, antibody, receptor ligand), a tag (e.g., fluorophore, light sensitive agent such as KillerRed), or an editing or targeting moiety described herein. In some embodiments, a membrane translocating polypeptide described herein is linked to one or more heterologous moieties. In one embodiment, the heterologous moiety is a small molecule (e.g., a peptidomimetic or a small organic molecule with a molecular weight of less than 2000 daltons), a peptide or polypeptide (e.g., an antibody or antigen-binding fragment thereof), a nanoparticle, an aptamer, or pharmacoagent.

### Viruses

[2145] In some embodiments, the composition may further comprise a virus as a heterologous moiety, e.g., a single stranded DNA virus, e.g., Anellovirus, Bidnavirus, Circovirus, Geminivirus, Genomovirus, Inovirus, Microvirus, Nanovirus, Parvovirus, and Spiravirus. In some embodiments, the composition may further comprise a double stranded DNA virus, e.g., Adenovirus, Ampullavirus, Ascovirus, Asfarvirus, Baculovirus, Fusellovirus, Globulovirus, Guttavirus, Hytrosavirus, Herpesvirus, Iridovirus, Lipothrixvirus, Nimavirus, and Poxvirus. In some embodiments, the composition may further comprise an RNA virus, e.g., Alphavirus, Furovirus, Hepatitis virus, Hordeivirus, Tobamovirus, Tobravirus, Tricornavirus, Rubivirus, Birnavirus, Cystovirus, Partitivirus, and Reovirus. In some embodiments, the anellovector or anelloVLP is administered with a virus as a heterologous moiety.

[2146] In some embodiments, the heterologous moiety may comprise a non-pathogenic, e.g., symbiotic, commensal, native, virus. In some embodiments, the non-pathogenic virus is one or more anelloviruses, e.g., Alphatorquevirus (TT), Betatorquevirus (TTM), and Gammatorquevirus (TTMD). In some embodiments, the anellovirus may include a Torque Teno Virus (TT), a SEN virus, a Sentinel virus, a TTV-like mini virus, a TT virus, a TT virus genotype 6, a TT virus group, a TTV-like virus DXL1, a TTV-like virus DXL2, a Torque Teno-like Mini Virus (TTM), or a Torque Teno-like Midi Virus (TTMD). In some embodiments, the non-pathogenic virus comprises one or more sequences having at least at least about 60%, 70% 80%, 85%, 90% 95%, 96%, 97%, 98% and 99% nucleotide sequence identity to any one of the nucleotide sequences described herein, e.g., as listed in any one of Tables N1-N32.

[2147] In some embodiments, the heterologous moiety may comprise one or more viruses that are identified as lacking in the subject. For example, a subject identified as having dyvirosis may be administered a composition comprising an anellovector and one or more viral components or viruses that are imbalanced in the subject or having a ratio that differs from a reference value, e.g., a healthy subject.

[2148] In some embodiments, the heterologous moiety may comprise one or more non-anelloviruses, e.g., adenovirus, herpes virus, pox virus, vaccinia virus, SV40, papilloma virus, an RNA virus such as a retrovirus, e.g., lenti virus, a single-stranded RNA virus, e.g., hepatitis virus, or a double-stranded RNA virus e.g., rotavirus. In some embodiments, the anellovector or the virus is defective, or requires assistance in order to produce infectious particles. Such assistance can be provided, e.g., by using helper cell lines that contain a nucleic acid, e.g., plasmids or DNA integrated into the genome, encoding one or more of (e.g., all of) the structural genes of the replication defective anellovector or virus under the control of regulatory sequences within the LTR. Suitable cell lines for replicating the anellovectors described herein include cell lines known in the art, e.g., A549 cells, which can be modified as described herein.

### Targeting Moiety

[2149] In some embodiments, the composition, anellovector, or anelloVLP described herein may further comprise a targeting moiety, e.g., a targeting moiety that specifically binds to a molecule of interest present on a target cell. The targeting moiety may modulate a specific function of the molecule of interest or cell, modulate a specific molecule (e.g., enzyme, protein or nucleic acid), e.g., a specific molecule downstream of the molecule of interest in a pathway, or specifically bind to a target to localize the anellovector, or anelloVLP, or genetic element. For example, a targeting moiety may include a therapeutic that interacts with a specific molecule of interest to increase, decrease or otherwise modulate its function.

### Tagging or Monitoring Moiety

[2150] In some embodiments, the composition, anellovector, or anelloVLP described herein may further comprise a tag to label or monitor the anellovector, anelloVLP, or genetic element described herein. The tagging or monitoring moiety may be removable by chemical agents or enzymatic cleavage, such as proteolysis or intein splicing. An affinity tag may be useful to purify the tagged polypeptide using an affinity technique. Some examples include, chitin binding protein (CBP), maltose binding protein (MBP), glutathione-S-transferase (GST), and poly(His) tag. A solubilization tag may be useful to aid recombinant proteins expressed in chaperone-deficient species such as E. coli to assist in the proper folding in proteins and keep them from precipitating. Some examples include thioredoxin (TRX) and poly(NANP). The tagging or monitoring moiety may include a light sensitive tag, e.g., fluorescence. Fluorescent tags are useful for visualization. GFP and its variants are some examples commonly used as fluorescent tags. Protein tags may allow specific enzymatic modifications (such as biotinylation by biotin ligase) or chemical modifications (such as reaction with FlAsH-EDT2 for fluorescence imaging) to occur. Often tagging or monitoring moiety are combined, in order to connect proteins to multiple other components. The tagging or monitoring moiety may also be removed by specific proteolysis or enzymatic cleavage (e.g. by TEV protease, Thrombin, Factor Xa or Enteropeptidase).

### Nanoparticles

[2151] In some embodiments, the composition, anellovector, or anelloVLP described herein may further comprise a nanoparticle. Nanoparticles include inorganic materials with a size between about 1 and about 1000 nanometers, between about 1 and about 500 nanometers in size, between about 1 and about 100 nm, between about 50 nm and about 300 nm, between about 75 nm and about 200 nm, between about 100 nm and about 200 nm, and any range therebetween. Nanoparticles generally have a composite structure of nanoscale dimensions. In some embodiments, nanoparticles are typically spherical although different morphologies are possible depending on the nanoparticle composition. The portion of the nanoparticle contacting an environment external to the nanoparticle is generally identified as the surface of the nanoparticle. In nanoparticles described herein, the size limitation can be restricted to two dimensions and so that nanoparticles include composite structure having a diameter from about 1 to about 1000 nm, where the specific diameter depends on the nanoparticle composition and on the intended use of the nanoparticle according to the experimental design. For example, nanoparticles used in therapeutic applications typically have a size of about 200 nm or below.

[2152] Additional desirable properties of the nanoparticle, such as surface charges and steric stabilization, can also vary in view of the specific application of interest. Exemplary properties that can be desirable in clinical applications such as cancer treatment are described in Davis et al, Nature 2008 vol. 7, pages 771-782; Duncan, Nature 2006 vol. 6, pages 688-701; and Allen, Nature 2002 vol. 2 pages 750-763, each incorporated herein by reference in its entirety. Additional properties are identifiable by a skilled person upon reading of the present disclosure. Nanoparticle dimensions and properties can be detected by techniques known in the art. Exemplary techniques to detect particles dimensions include but are not limited to dynamic light scattering (DLS) and a variety of microscopies such at transmission electron microscopy (TEM) and atomic force microscopy (AFM). Exemplary techniques to detect particle morphology include but are not limited to TEM and AFM. Exemplary techniques to detect surface charges of the nanoparticle include but are not limited to zeta potential method. Additional techniques suitable to detect other chemical properties comprise by ¹H, ¹¹B, and ¹³C and ¹⁹F NMR, UV/Vis and infrared/Raman spectroscopies and fluorescence spectroscopy (when nanoparticle is used in combination with fluorescent labels) and additional techniques identifiable by a skilled person.

### Small Molecules

[2153] In some embodiments, the composition, anellovector, or anelloVLP described herein may further comprise a small molecule. Small molecule moieties include, but are not limited to, small peptides, peptidomimetics (e.g., peptoids), amino acids, amino acid analogs, synthetic polynucleotides, polynucleotide analogs, nucleotides, nucleotide analogs, organic and inorganic compounds (including heterorganic and organomettallic compounds) generally having a molecular weight less than about 5,000 grams per mole, e.g., organic or inorganic compounds having a molecular weight less than about 2,000 grams per mole, e.g., organic or inorganic compounds having a molecular weight less than about 1,000 grams per mole, e.g., organic or inorganic compounds having a molecular weight less than about 500 grams per mole, and salts, esters, and other pharmaceutically acceptable forms of such compounds. Small molecules may include, but are not limited to, a neurotransmitter, a hormone, a drug, a toxin, a viral or microbial particle, a synthetic molecule, and agonists or antagonists.

[2154] Examples of suitable small molecules include those described in, “The Pharmacological Basis of Therapeutics,” Goodman and Gilman, McGraw-Hill, New York, N.Y., (1996), Ninth edition, under the sections: Drugs Acting at Synaptic and Neuroeffector Junctional Sites; Drugs Acting on the Central Nervous System; Autacoids: Drug Therapy of Inflammation; Water, Salts and Ions; Drugs Affecting Renal Function and Electrolyte Metabolism; Cardiovascular Drugs; Drugs Affecting Gastrointestinal Function; Drugs Affecting Uterine Motility; Chemotherapy of Parasitic Infections; Chemotherapy of Microbial Diseases; Chemotherapy of Neoplastic Diseases; Drugs Used for Immunosuppression; Drugs Acting on Blood-Forming organs; Hormones and Hormone Antagonists; Vitamins, Dermatology; and Toxicology, all incorporated herein by reference. Some examples of small molecules include, but are not limited to, prion drugs such as tacrolimus, ubiquitin ligase or HECT ligase inhibitors such as heclin, histone modifying drugs such as sodium butyrate, enzymatic inhibitors such as 5-aza-cytidine, anthracyclines such as doxorubicin, beta-lactams such as penicillin, anti-bacterials, chemotherapy agents, anti-virals, modulators from other organisms such as VP64, and drugs with insufficient bioavailability such as chemotherapeutics with deficient pharmacokinetics.

[2155] In some embodiments, the small molecule is an epigenetic modifying agent, for example such as those described in de Groote et al. Nuc. Acids Res. (2012):1-18. Exemplary small molecule epigenetic modifying agents are described, e.g., in Lu et al. J. Biomolecular Screening 17.5 (2012):555-71, e.g., at Table 1 or 2, incorporated herein by reference. In some embodiments, an epigenetic modifying agent comprises vorinostat or romidepsin. In some embodiments, an epigenetic modifying agent comprises an inhibitor of class I, II, III, and/or IV histone deacetylase (HDAC). In some embodiments, an epigenetic modifying agent comprises an activator of SirTI. In some embodiments, an epigenetic modifying agent comprises Garcinol, Lys-CoA, C646, (+)-JQI, I-BET, BICI, MS120, DZNep, UNC0321, EPZ004777, AZ505, AMI-I, pyrazole amide 7b, benzo[d]imidazole 17b, acylated dapsone derivative (e.g., PRMTI), methylstat, 4,4′-dicarboxy-2,2′-bipyridine, SID 85736331, hydroxamate analog 8, tanylcypromie, bisguanidine and biguanide polyamine analogs, UNC669, Vidaza, decitabine, sodium phenyl butyrate (SDB), lipoic acid (LA), quercetin, valproic acid, hydralazine, bactrim, green tea extract (e.g., epigallocatechin gallate (EGCG)), curcumin, sulforphane and/or allicin/diallyl disulfide. In some embodiments, an epigenetic modifying agent inhibits DNA methylation, e.g., is an inhibitor of DNA methyltransferase (e.g., is 5-azacitidine and/or decitabine). In some embodiments, an epigenetic modifying agent modifies histone modification, e.g., histone acetylation, histone methylation, histone sumoylation, and/or histone phosphorylation. In some embodiments, the epigenetic modifying agent is an inhibitor of a histone deacetylase (e.g., is vorinostat and/or trichostatin A).

[2156] In some embodiments, the small molecule is a pharmaceutically active agent. In one embodiment, the small molecule is an inhibitor of a metabolic activity or component. Useful classes of pharmaceutically active agents include, but are not limited to, antibiotics, anti-inflammatory drugs, angiogenic or vasoactive agents, growth factors and chemotherapeutic (anti-neoplastic) agents (e.g., tumour suppressers). One or a combination of molecules from the categories and examples described herein or from (Orme-Johnson 2007, Methods Cell Biol. 2007; 80:813-26) can be used. In one embodiment, the invention includes a composition comprising an antibiotic, anti-inflammatory drug, angiogenic or vasoactive agent, growth factor or chemotherapeutic agent.

### Peptides or Proteins

[2157] In some embodiments, the composition, anellovector, or anelloVLP described herein may further comprise a peptide or protein. The peptide moieties may include, but are not limited to, a peptide ligand or antibody fragment (e.g., antibody fragment that binds a receptor such as an extracellular receptor), neuropeptide, hormone peptide, peptide drug, toxic peptide, viral or microbial peptide, synthetic peptide, and agonist or antagonist peptide.

[2158] Peptides moieties may be linear or branched. The peptide has a length from about 5 to about 200 amino acids, about 15 to about 150 amino acids, about 20 to about 125 amino acids, about 25 to about 100 amino acids, or any range therebetween.

[2159] Some examples of peptides include, but are not limited to, fluorescent tags or markers, antigens, antibodies, antibody fragments such as single domain antibodies, ligands and receptors such as glucagon-like peptide-1 (GLP-1), GLP-2 receptor 2, cholecystokinin B (CCKB) and somatostatin receptor, peptide therapeutics such as those that bind to specific cell surface receptors such as G protein-coupled receptors (GPCRs) or ion channels, synthetic or analog peptides from naturally-bioactive peptides, anti-microbial peptides, pore-forming peptides, tumor targeting or cytotoxic peptides, and degradation or self-destruction peptides such as an apoptosis-inducing peptide signal or photosensitizer peptide.

[2160] Peptides useful in the invention described herein also include small antigen-binding peptides, e.g., antigen binding antibody or antibody-like fragments, such as single chain antibodies, nanobodies (see, e.g., Steeland et al. 2016. Nanobodies as therapeutics: big opportunities for small antibodies. Drug Discov Today: 21(7):1076-113). Such small antigen binding peptides may bind a cytosolic antigen, a nuclear antigen, an intra-organellar antigen.

[2161] In some embodiments, the composition, anellovector, or anelloVLP described herein includes a polypeptide linked to a ligand that is capable of targeting a specific location, tissue, or cell.

### Oligonucleotide Aptamers

[2162] In some embodiments, the composition, anellovector, or anelloVLP described herein may further comprise an oligonucleotide aptamer. Aptamer moieties are oligonucleotide or peptide aptamers. Oligonucleotide aptamers are single-stranded DNA or RNA (ssDNA or ssRNA) molecules that can bind to pre-selected targets including proteins and peptides with high affinity and specificity.

[2163] Oligonucleotide aptamers are nucleic acid species that may be engineered through repeated rounds of in vitro selection or equivalently, SELEX (systematic evolution of ligands by exponential enrichment) to bind to various molecular targets such as small molecules, proteins, nucleic acids, and even cells, tissues and organisms. Aptamers provide discriminate molecular recognition, and can be produced by chemical synthesis. In addition, aptamers may possess desirable storage properties, and elicit little or no immunogenicity in therapeutic applications.

[2164] Both DNA and RNA aptamers can show robust binding affinities for various targets. For example, DNA and RNA aptamers have been selected for t lysozyme, thrombin, human immunodeficiency virus trans-acting responsive element (HIV TAR), (see en.wikipedia.org/wiki/Aptamer-cite_note-10), hemin, interferon γ, prostate specific antigen (PSA), dopamine, and the non-classical oncogene, heat shock factor 1 (HSF1).

### Peptide Aptamers

[2165] In some embodiments, the composition, anellovector, or anelloVLP described herein may further comprise a peptide aptamer. Peptide aptamers have one (or more) short variable peptide domains, including peptides having low molecular weight, 12-14 kDa. Peptide aptamers may be designed to specifically bind to and interfere with protein-protein interactions inside cells.

[2166] Peptide aptamers are artificial proteins selected or engineered to bind specific target molecules. These proteins include of one or more peptide loops of variable sequence. They are typically isolated from combinatorial libraries and often subsequently improved by directed mutation or rounds of variable region mutagenesis and selection. In vivo, peptide aptamers can bind cellular protein targets and exert biological effects, including interference with the normal protein interactions of their targeted molecules with other proteins. In particular, a variable peptide aptamer loop attached to a transcription factor binding domain is screened against the target protein attached to a transcription factor activating domain. In vivo binding of the peptide aptamer to its target via this selection strategy is detected as expression of a downstream yeast marker gene. Such experiments identify particular proteins bound by the aptamers, and protein interactions that the aptamers disrupt, to cause the phenotype. In addition, peptide aptamers derivatized with appropriate functional moieties can cause specific post-translational modification of their target proteins, or change the subcellular localization of the targets

[2167] Peptide aptamers can also recognize targets in vitro. They have found use in lieu of antibodies in biosensors and used to detect active isoforms of proteins from populations containing both inactive and active protein forms. Derivatives known as tadpoles, in which peptide aptamer “heads” are covalently linked to unique sequence double-stranded DNA “tails”, allow quantification of scarce target molecules in mixtures by PCR (using, for example, the quantitative real-time polymerase chain reaction) of their DNA tails.

[2168] Peptide aptamer selection can be made using different systems, but the most used is currently the yeast two-hybrid system. Peptide aptamers can also be selected from combinatorial peptide libraries constructed by phage display and other surface display technologies such as mRNA display, ribosome display, bacterial display and yeast display. These experimental procedures are also known as biopannings. Among peptides obtained from biopannings, mimotopes can be considered as a kind of peptide aptamers. All the peptides panned from combinatorial peptide libraries have been stored in a special database with the name MimoDB.

### V. Host Cells

[2169] The invention is further directed to a host or host cell comprising an anellovector or anelloVLP as described herein. In some embodiments, the host or host cell is a plant, insect, bacteria, fungus, vertebrate, mammal (e.g., human), or other organism or cell. In certain embodiments, as confirmed herein, provided anellovectors infect a range of different host cells. Target host cells include cells of mesodermal, endodermal, or ectodermal origin. Target host cells include, e.g., epithelial cells, muscle cells, white blood cells (e.g., lymphocytes), kidney tissue cells, lung tissue cells.

[2170] In some embodiments, the anellovector or anelloVLP is substantially non-immunogenic in the host. In certain embodiments, the anellovector or genetic element thereof, or the anelloVLP, fails to produce an undesired substantial response by the host's immune system. Some immune responses include, but are not limited to, humoral immune responses (e.g., production of antigen-specific antibodies) and cell-mediated immune responses (e.g., lymphocyte proliferation).

[2171] In some embodiments, a host or a host cell is contacted with (e.g., infected with) an anellovector or anelloVLP. In some embodiments, the host is a mammal, such as a human. The amount of the anellovector or anelloVLP in the host can be measured at any time after administration. In certain embodiments, a time course of anellovector growth in a culture is determined.

[2172] In some embodiments, the anellovector, e.g., an anellovector as described herein, is heritable. In some embodiments, the anellovector is transmitted linearly in fluids and/or cells from mother to child. In some embodiments, daughter cells from an original host cell comprise the anellovector. In some embodiments, a mother transmits the anellovector to child with an efficiency of at least 25%, 50%, 60%, 70%, 80%, 85%, 90%, 95%, or 99%, or a transmission efficiency from host cell to daughter cell at least 25%, 50%, 60%, 70%, 80%, 85%, 90%, 95%, or 99%. In some embodiments, the anellovector in a host cell has a transmission efficiency during meiosis of at 25%, 50%, 60%, 70%, 80%, 85%, 90%, 95%, or 99%. In some embodiments, the anellovector in a host cell has a transmission efficiency during mitosis of at least 25%, 50%, 60%, 70%, 80%, 85%, 90%, 95%, or 99%. In some embodiments, the anellovector in a cell has a transmission efficiency between about 10%-20%, 20%-30%, 30%-40%, 40%-50%, 50%-60%, 60%-70%, 70%-75%, 75%-80%, 80%-85%, 85%-90%, 90%-95%, 95%-99%, or any percentage therebetween.

[2173] In some embodiments, the anellovector, e.g., anellovector replicates within the host cell. In one embodiment, the anellovector is capable of replicating in a mammalian cell, e.g., human cell. In other embodiments, the anellovector is replication deficient or replication incompetent.

[2174] While in some embodiments the anellovector replicates in the host cell, the anellovector does not integrate into the genome of the host, e.g., with the host's chromosomes. In some embodiments, the anellovector has a negligible recombination frequency, e.g., with the host's chromosomes. In some embodiments, the anellovector has a recombination frequency, e.g., less than about 1.0 cM/Mb, 0.9 cM/Mb, 0.8 cM/Mb, 0.7 cM/Mb, 0.6 cM/Mb, 0.5 cM/Mb, 0.4 cM/Mb, 0.3 cM/Mb, 0.2 cM/Mb, 0.1 cM/Mb, or less, e.g., with the host's chromosomes.

### VI. Methods of Use

[2175] The anellovectors and compositions comprising anellovectors or anelloVLPs described herein may be used in methods of treating a disease, disorder, or condition, e.g., in a subject (e.g., a mammalian subject, e.g., a human subject) in need thereof. Administration of a pharmaceutical composition described herein may be, for example, by way of parenteral (including intravenous, intratumoral, intraperitoneal, intramuscular, intracavity, and subcutaneous) administration. In some embodiments, an Anelloviridae family vector, e.g., anellovector, or pharmaceutical composition as described herein is administered subretinally. In some embodiments, an Anelloviridae family vector, e.g., anellovector, or pharmaceutical composition as described herein is administered intravitreally. In some embodiments, an Anelloviridae family vector, e.g., anellovector, or pharmaceutical composition as described herein is administered suprachoroidally. The anellovectors may be administered alone or formulated as a pharmaceutical composition.

[2176] The anellovectors or anelloVLP may be administered in the form of a unit-dose composition, such as a unit dose parenteral composition. Such compositions are generally prepared by admixture and can be suitably adapted for parenteral administration. Such compositions may be, for example, in the form of injectable and infusable solutions or suspensions or suppositories or aerosols.

[2177] In some embodiments, administration of an Anelloviridae family vector (e.g., anellovector) or composition comprising same, e.g., as described herein, may result in delivery of a genetic element comprised by the Anelloviridae family vector (e.g., anellovector) to a target cell, e.g., in a subject.

[2178] An anellovector or anelloVLP, or composition thereof, described herein, e.g., comprising an effector (e.g., an endogenous or exogenous effector), may be used to deliver the effector to a cell, tissue, or subject. In some embodiments, the effector is a therapeutic effector. In some embodiments, the Anelloviridae family vector (e.g., anellovector) or composition thereof is used to deliver the effector to the eye of a subject, e.g., a mammalian subject, e.g., a human subject. In some embodiments, the Anelloviridae family vector (e.g., anellovector) or composition thereof is used to deliver the effector to a cell of the eye of a subject, e.g., a mammalian subject, e.g., a human subject. In certain embodiments, the cell of the eye is a photoreceptor cell, a retinal cell, a cell of the posterior eye cup (PEC), retinal ganglion cell, a cell of the optic nerve, a cell of the optic nerve head, or a retinal pigmented epithelium (RPE) cell. In some embodiments, the Anelloviridae family vector (e.g., anellovector) or composition thereof is used to deliver the effector to bone marrow, blood, heart, GI or skin. Delivery of an effector by administration of an anellovector composition or anelloVLP composition described herein may modulate (e.g., increase or decrease) expression levels of a noncoding RNA or polypeptide in the cell, tissue, or subject. Modulation of expression level in this fashion may result in alteration of a functional activity in the cell to which the effector is delivered. In some embodiments, the modulated functional activity may be enzymatic, structural, or regulatory in nature.

[2179] In some embodiments, the anellovector or anelloVLP, or copies thereof, are detectable in a cell 24 hours (e.g., 1 day, 2 days, 3 days, 4 days, 5 days, 6 days, 1 week, 2 weeks, 3 weeks, 4 weeks, 30 days, or 1 month) after delivery into a cell. In embodiments, an anellovector, anelloVLP, or composition thereof mediates an effect on a target cell, and the effect lasts for at least 1, 2, 3, 4, 5, 6, or 7 days, 2, 3, or 4 weeks, or 1, 2, 3, 6, or 12 months. In some embodiments (e.g., wherein the Anelloviridae family vector (e.g., anellovector) or composition thereof comprises a genetic element encoding an exogenous protein), the effect lasts for less than 1, 2, 3, 4, 5, 6, or 7 days, 2, 3, or 4 weeks, or 1, 2, 3, 6, or 12 months.

[2180] Examples of diseases, disorders, and conditions that can be treated with an anellovector or anelloVLP described herein, or a composition comprising the anellovector or anelloVLP, include, without limitation: immune disorders, interferonopathies (e.g., Type I interferonopathies), infectious diseases, inflammatory disorders, autoimmune conditions, cancer (e.g., a solid tumor, e.g., lung cancer, non-small cell lung cancer, e.g., a tumor that expresses a gene responsive to mIR-625, e.g., caspase-3), and gastrointestinal disorders. In some embodiments, the anellovector or anelloVLP modulates (e.g., increases or decreases) an activity or function in a cell with which the anellovector is contacted. In some embodiments, the anellovector or anelloVLP modulates (e.g., increases or decreases) the level or activity of a molecule (e.g., a nucleic acid or a protein) in a cell with which the anellovector or anelloVLP is contacted. In some embodiments, the anellovector or anelloVLP decreases viability of a cell, e.g., a cancer cell, with which the anellovector or anelloVLP is contacted, e.g., by at least about 10%, 20%, 30%, 40%, 50%, 60%, 70%, 80%, 90%, 95%, 99%, or more. In some embodiments, the anellovector or anelloVLP comprises an effector, e.g., an miRNA, e.g., miR-625, that decreases viability of a cell, e.g., a cancer cell, with which the anellovector or anelloVLP is contacted, e.g., by at least about 10%, 20%, 30%, 40%, 50%, 60%, 70%, 80%, 90%, 95%, 99%, or more. In some embodiments, the anellovector or anelloVLP increases apoptosis of a cell, e.g., a cancer cell, e.g., by increasing caspase-3 activity, with which the anellovector is contacted, e.g., by at least about 10%, 20%, 30%, 40%, 50%, 60%, 70%, 80%, 90%, 95%, 99%, or more. In some embodiments, the anellovector or anelloVLP comprises an effector, e.g., an miRNA, e.g., miR-625, that increases apoptosis of a cell, e.g., a cancer cell, e.g., by increasing caspase-3 activity, with which the anellovector or anelloVLP is contacted, e.g., by at least about 10%, 20%, 30%, 40%, 50%, 60%, 70%, 80%, 90%, 95%, 99%, or more.

### Methods of Treatment (e.g., for Diseases or Disorders of the Eye)

[2181] In one aspect, the present disclosure provides a method for treating disease, disorder, or condition (e.g., a disease of the eye), the method comprising administering a pharmaceutically effective amount of an Anelloviridae family vector or a pharmaceutical composition comprising an Anelloviridae family vector provided herein to a subject (e.g., a human subject) in need of such treatment.

[2182] In some embodiments, a disease, disorder, or condition that can be treated with the Anelloviridae family vector (e.g., anellovector) described herein, or a composition comprising the Anelloviridae family vector (e.g., anellovector), is a disease of the eye.

[2183] In some embodiments, the disease is selected from the group of ocular neovascular diseases consisting of: age-related macular degeneration (AMD), wet-AMD, dry-AMD, retinal neovascularization, choroidal neovascularization diabetic retinopathy, proliferative diabetic retinopathy, retinal vein occlusion, central retinal vein occlusion, branched retinal vein occlusion, diabetic macular edema, diabetic retinal ischemia, ischemic retinopathy and diabetic retinal edema.

[2184] In some embodiments, a disease, disorder, or condition that can be treated with the Anelloviridae family vector (e.g., anellovector) described herein, or a composition comprising such an Anelloviridae family vector, is a monogenic disease.

[2185] In some embodiments, a disease, disorder, or condition that can be treated with the Anelloviridae family vector (e.g., anellovector) described herein, or a composition comprising such an Anelloviridae family vector, is a polygenic disease (e.g., glaucoma).

[2186] In some embodiments, a disease, disorder, or condition that can be treated with the Anelloviridae family vector (e.g., anellovector) described herein, or a composition comprising such an Anelloviridae family vector, is a macular degeneration (e.g., age-related macular degeneration (AMD), Stargardt disease, or myopic macular degeneration). In certain embodiments, the macular degeneration is wet AMD. In certain embodiments, the macular degeneration is dry AMD (e.g., AMD with geographic atrophy).

[2187] In some embodiments, a disease, disorder, or condition that can be treated with the Anelloviridae family vector (e.g., anellovector) described herein, or a composition comprising such an Anelloviridae family vector, is a retinal disease. In certain embodiments, the retinal disease is an inherited retinal disease (IRD), e.g., as described in Stone et al. (2017, Ophthalmology; incorporated herein by reference with respect to diseases and disorders described therein). In certain embodiments, the retinal disease is retinitis pigmentosa (e.g., X-linked retinitis pigmentosa (XLRP).

[2188] In some embodiments, a disease, disorder, or condition that can be treated with the Anelloviridae family vector (e.g., anellovector) described herein, or a composition comprising such an Anelloviridae family vector, is a VEGF-associated disorder (e.g., a cancer, e.g., as described herein; a macular edema; or a proliferative retinopathy).

[2189] In some embodiments, the disease, disorder, or conditionis selected from the group consisting of: retinal leakage, Leber congenital amaurosis (LCA) (e.g., wherein the genetic element comprises a human RPE65 sequence, e.g., a sequence encoding a human RPE65 protein, or an amino acid sequence having at least 75%, 80%, 85%, 90%, 95%, 96%, 97%, 98%, or 99% sequence identity thereto), amaurosis congenita, cone rod dystrophy, choroideremia, vitelliform macular dystrophy, hyperferritinemia-cataract syndrome, optic atrophy, XLR retinoschisis, cytomegalovirus retinitis, achromatopsia, Leber hereditary optical neuropathy, keratitis, uveitis, Grave's opthalmolopathy, diabetic retinopathy, or diabetic macular edema.

[2190] In some cases, dry AMD may be treated. In some cases, dry AMD may be referred to as central geographic atrophy, characterized by atrophy of the retinal pigment epithelial later below the retina and subsequent loss of photoreceptors in the central part of the eye. The composition and methods of this disclosure provide for the treatment of any and all forms of AMD.

[2191] In another aspect, the present disclosure provides a method for prophylactic treatment of AMD or ocular neovascular diseases as described herein, comprising administering a pharmaceutically effective amount of the pharmaceutical compositions provided herein to a human subject in need of such treatment. The present disclosure may be used to treat patients at risk of developing AMD, or presenting early symptoms of the disease. This may include treatment of eyes either simultaneously or sequentially. Simultaneous treatment may mean that the treatment is administered to each eye at the same time or that both eyes are treated during the same visit to a treating physician or other healthcare provider. It has been documented that patients have a higher risk of developing AMD in a healthy fellow eye of an eye that presents symptoms of AMD, or in patients who have a genetic predisposition toward developing AMD. The present disclosure can be used as a prophylactic treatment in prevention of AMD in the fellow eye. While the mechanism underlying the increased risk for the progression of ocular neovascular disease in a fellow eye is unknown, there are multiple studies in the art detailing this elevated risk. For example, in one such large scale study, of 110 fellow eyes observed that progressed to advanced AMD, choroidal neovascularization (CNV) developed in 98 eyes and foveal geographic atrophy (GA) in 15 eyes. Ophthalmologica 2011; 226(3):110-8. doi: 10.1159/000329473. Curr Opin Ophthalmol. 1998 June; 9(3):38-46. No non-ocular characteristic (age, gender, history of hypertension or smoking) or ocular feature of the study eye at baseline (lesion composition, lesion size, or visual acuity) was predictive of progression to advanced AMD in this cohort. However, statistical analysis indicates that AMD symptoms of the first eye, including drusen size, focal hyperpigmentation, and nonfoveal geographic atrophy had significant independent relationships in assessing risk of developing of AMD in the fellow eye. Recent studies have indicated that of ocular characteristics, genetic factors and certain environmental factors may play a role in the increased risk of developing AMD in the fellow eye. JAMA Ophthalmol. 2013 Apr. 1; 131(4):448-55. doi: 10.1001/jamaophthalmol.2013.2578. Given the well characterized elevated risk of AMD development in untreated fellow eyes, there is need in the art of methods for preventing onset and subsequent vision loss due to the disease.

[2192] In some aspects, no vector is detected in the human subject's tear, blood, saliva or urine samples 7, 14, 21 or 30 days after administering said pharmaceutical composition. In some aspects, the presence of the viral vector is detected by qPCR or ELISA as known in the art.

[2193] In some aspects, the human subject shows no clinically significant retinal toxicity as assessed by serial ophthalmic examinations over at least about a 2, 3, 4, 5, 6, 7, 8, 9, 10, 11 or 12 month months period. In some aspects, the human subject shows no clinically significant retinal toxicity as assessed by serial ophthalmic examinations over at most about a 2, 3, 4, 5, 6, 7, 8, 9, 10, 11 or 12 month months period.

[2194] In some aspects, no superficial, anterior segment or vitreous inflammatory signs are present in the human subject over at least a two months period. In some cases, no superficial, anterior segment or vitreous inflammatory signs are present in the human subject at 1 week or at 3, 6, 9 or 12 months after administration of the pharmaceutical composition.

[2195] In some aspects, there is no evidence of visual acuity loss, TOP elevation, retinal detachment, or any intraocular or systemic immune response in said human subject at least 120 days post administration.

[2196] In some embodiments, a diseases, disorder, or condition that can be treated with the Anelloviridae family vector (e.g., anellovector) described herein, or a composition comprising the Anelloviridae family vector (e.g., anellovector), is a disease of the eye.

[2197] In some embodiments, the disease of the eye is selected from the group consisting of: neovascular age-related macular degeneration (nAMD) (also known as wet AMD or WAMD), dry AMD, retinal vein occlusion (RVO), diabetic macular edema (DME), or diabetic retinopathy (DR) (in particular, wet AMD), comprising delivering to the retina or to the posterior eye cup (PEC) of said human subject a therapeutically effective amount of anti-hVEGF antigen-binding fragment. In some embodiments, a disease, disorder, or condition that can be treated with the Anelloviridae family vector (e.g., anellovector) described herein, or a composition comprising such an Anelloviridae family vector, is a monogenic disease.

[2198] In some embodiments, a disease, disorder, or condition that can be treated with the Anelloviridae family vector (e.g., anellovector) described herein, or a composition comprising such an Anelloviridae family vector, is a polygenic disease (e.g., glaucoma).

[2199] In some embodiments, a disease, disorder, or condition that can be treated with the Anelloviridae family vector (e.g., anellovector) described herein, or a composition comprising such an Anelloviridae family vector, is a macular degeneration (e.g., age-related macular degeneration (AMD), Stargardt disease, or myopic macular degeneration). In certain embodiments, the macular degeneration is wet AMD. In certain embodiments, the macular degeneration is dry AMD (e.g., AMD with geographic atrophy).

[2200] In some embodiments, a disease, disorder, or condition that can be treated with the Anelloviridae family vector (e.g., anellovector) described herein, or a composition comprising such an Anelloviridae family vector, is a retinal disease. In certain embodiments, the retinal disease is an inherited retinal disease (IRD), e.g., as described in Stone et al. (2017, Ophthalmology; incorporated herein by reference with respect to diseases and disorders described therein). In certain embodiments, the retinal disease is retinitis pigmentosa (e.g., X-linked retinitis pigmentosa (XLRP).

[2201] In some embodiments, a disease, disorder, or condition that can be treated with the Anelloviridae family vector (e.g., anellovector) described herein, or a composition comprising such an Anelloviridae family vector, is a VEGF-associated disorder (e.g., a cancer, e.g., as described herein; a macular edema; or a proliferative retinopathy).

[2202] In some embodiments, the disease, disorder, or condition is selected from the group consisting of: retinal leakage, Leber congenital amaurosis (LCA) (e.g., wherein the genetic element comprises a human RPE65 sequence, e.g., a sequence encoding a human RPE65 protein, or an amino acid sequence having at least 75%, 80%, 85%, 90%, 95%, 96%, 97%, 98%, or 99% sequence identity thereto), amaurosis congenita, cone rod dystrophy, choroideremia, vitelliform macular dystrophy, hyperferritinemia-cataract syndrome, optic atrophy, XLR retinoschisis, cytomegalovirus retinitis, achromatopsia, Leber hereditary optical neuropathy, keratitis, uveitis, Grave's opthalmolopathy, diabetic retinopathy, or diabetic macular edema.

[2203] In some embodiments, a disease, disorder, or condition (e.g., as described herein) is treated by intravitreal administration of an Anelloviridae family vector as described herein. In some embodiments, a disease, disorder, or condition (e.g., as described herein) is treated by subretinal administration of an Anelloviridae family vector as described herein. In some embodiments, a disease, disorder, or condition (e.g., as described herein) is treated by suprachoroidal administration of an Anelloviridae family vector as described herein.

### VII. Methods of Production

### Producing the Genetic Element

[2204] Methods of making the genetic element of the anellovector are described in, for example, Khudyakov & Fields, Artificial DNA: Methods and Applications, CRC Press (2002); in Zhao, Synthetic Biology: Tools and Applications, (First Edition), Academic Press (2013); and Egli & Herdewijn, Chemistry and Biology of Artificial Nucleic Acids, (First Edition), Wiley-VCH (2012).

[2205] In some embodiments, the genetic element may be designed using computer-aided design tools. The anellovector may be divided into smaller overlapping pieces (e.g., in the range of about 100 bp to about 10 kb segments or individual ORFs) that are easier to synthesize. These DNA segments are synthesized from a set of overlapping single-stranded oligonucleotides. The resulting overlapping synthons are then assembled into larger pieces of DNA, e.g., the anellovector. The segments or ORFs may be assembled into the anellovector, e.g., in vitro recombination or unique restriction sites at 5′ and 3′ ends to enable ligation.

[2206] The genetic element can alternatively be synthesized with a design algorithm that parses the anellovector into oligo-length fragments, creating optimal design conditions for synthesis that take into account the complexity of the sequence space. Oligos are then chemically synthesized on semiconductor-based, high-density chips, where over 200,000 individual oligos are synthesized per chip. The oligos are assembled with an assembly techniques, such as BioFab®, to build longer DNA segments from the smaller oligos. This is done in a parallel fashion, so hundreds to thousands of synthetic DNA segments are built at one time.

[2207] Each genetic element or segment of the genetic element may be sequence verified. In some embodiments, high-throughput sequencing of RNA or DNA can take place using AnyDot.chips (Genovoxx, Germany), which allows for the monitoring of biological processes (e.g., miRNA expression or allele variability (SNP detection). In particular, the AnyDot-chips allow for 10×-50× enhancement of nucleotide fluorescence signal detection. AnyDot.chips and methods for using them are described in part in International Publication Application Nos. WO 02088382, WO 03020968, WO 0303 1947, WO 2005044836, PCTEP 05105657, PCMEP 05105655; and German Patent Application Nos. DE 101 49 786, DE 102 14 395, DE 103 56 837, DE 10 2004 009 704, DE 10 2004 025 696, DE 10 2004 025 746, DE 10 2004 025 694, DE 10 2004 025 695, DE 10 2004 025 744, DE 10 2004 025 745, and DE 10 2005 012 301.

[2208] Other high-throughput sequencing systems include those disclosed in Venter, J., et al. Science 16 Feb. 2001; Adams, M. et al, Science 24 Mar. 2000; and M. J, Levene, et al. Science 299:682-686, January 2003; as well as US Publication Application No. 20030044781 and 2006/0078937. Overall such systems involve sequencing a target nucleic acid molecule having a plurality of bases by the temporal addition of bases via a polymerization reaction that is measured on a molecule of nucleic acid, i.e., the activity of a nucleic acid polymerizing enzyme on the template nucleic acid molecule to be sequenced is followed in real time. The sequence can then be deduced by identifying which base is being incorporated into the growing complementary strand of the target nucleic acid by the catalytic activity of the nucleic acid polymerizing enzyme at each step in the sequence of base additions. A polymerase on the target nucleic acid molecule complex is provided in a position suitable to move along the target nucleic acid molecule and extend the oligonucleotide primer at an active site. A plurality of labeled types of nucleotide analogs are provided proximate to the active site, with each distinguishably type of nucleotide analog being complementary to a different nucleotide in the target nucleic acid sequence. The growing nucleic acid strand is extended by using the polymerase to add a nucleotide analog to the nucleic acid strand at the active site, where the nucleotide analog being added is complementary to the nucleotide of the target nucleic acid at the active site. The nucleotide analog added to the oligonucleotide primer as a result of the polymerizing step is identified. The steps of providing labeled nucleotide analogs, polymerizing the growing nucleic acid strand, and identifying the added nucleotide analog are repeated so that the nucleic acid strand is further extended and the sequence of the target nucleic acid is determined.

[2209] In some embodiments, shotgun sequencing is performed. In shotgun sequencing, DNA is broken up randomly into numerous small segments, which are sequenced using the chain termination method to obtain reads. Multiple overlapping reads for the target DNA are obtained by performing several rounds of this fragmentation and sequencing. Computer programs then use the overlapping ends of different reads to assemble them into a continuous sequence.

[2210] In some embodiments, factors for replicating or packaging may be supplied in cis or in trans, relative to the genetic element. For example, when supplied in cis, the genetic element may comprise one or more genes encoding an Anellovirus ORF1, ORF1/1, ORF1/2, ORF2, ORF2/2, ORF2/3, or ORF2t/3, e.g., as described herein. In some embodiments, replication and/or packaging signals can be incorporated into a genetic element, for example, to induce amplification and/or encapsulation. In some embodiments, this is done both in context of larger regions of the anellovector genome (e.g., inserting effectors into a specific site in the genome, or replacing viral ORFs with effectors).

[2211] In another example, when supplied in trans, the genetic element may lack genes encoding one or more of an Anellovirus ORF1, ORF1/1, ORF1/2, ORF2, ORF2/2, ORF2/3, or ORF2t/3, e.g., as described herein; this protein or proteins may be supplied, e.g., by another nucleic acid, e.g., a helper nucleic acid. In some embodiments, minimal cis signals (e.g., 5′ UTR and/or GC-rich region) are present in the genetic element. In some embodiments, the genetic element does not encode replication or packaging factors (e.g., replicase and/or capsid proteins). Such factors may, in some embodiments, be supplied by one or more helper nucleic acids (e.g., a helper viral nucleic acid, a helper plasmid, or a helper nucleic acid integrated into the host cell genome). In some embodiments, the helper nucleic acids express proteins and/or RNAs sufficient to induce amplification and/or packaging, but may lack their own packaging signals. In some embodiments, the genetic element and the helper nucleic acid are introduced into the host cell (e.g., concurrently or separately), resulting in amplification and/or packaging of the genetic element but not of the helper nucleic acid.

### In Vitro Circularization

[2212] In some instances, the genetic element to be packaged into a proteinaceous exterior is a single stranded circular DNA. The genetic element may, in some instances, be introduced into a host cell in a form other than a single stranded circular DNA. For example, the genetic element may be introduced into the host cell as a double-stranded circular DNA. The double-stranded circular DNA may then be converted into a single-stranded circular DNA in the host cell (e.g., a host cell comprising a suitable enzyme for rolling circle replication, e.g., an Anellovirus Rep protein, e.g., Rep68/78, Rep60, RepA, RepB, Pre, MobM, TraX, TrwC, Mob02281, Mob02282, NikB, ORF50240, NikK, TecH, OrfJ, or Tral, e.g., as described in Wawrzyniak et al. 2017, Front. Microbiol. 8: 2353; incorporated herein by reference with respect to the listed enzymes). In some embodiments, the double-stranded circular DNA is produced by in vitro circularization, e.g., as described in Example 35 of PCT Publication No. WO 2020/123816, incorporated by reference herein in its entirety. Generally, in vitro circularized DNA constructs can be produced by digesting a plasmid comprising the sequence of a genetic element to be packaged, such that the genetic element sequence is excised as a linear DNA molecule. The resultant linear DNA can then be ligated, e.g., using a DNA ligase, to form a double-stranded circular DNA. In some instances, a double-stranded circular DNA produced by in vitro circularization can undergo rolling circle replication, e.g., as described herein. Without wishing to be bound by theory, it is contemplated that in vitro circularization results in a double-stranded DNA construct that can undergo rolling circle replication without further modification, thereby being capable of producing single-stranded circular DNA of a suitable size to be packaged into an anellovector, e.g., as described herein. In some embodiments, the double-stranded DNA construct is smaller than a plasmid (e.g., a bacterial plasmid). In some embodiments, the double-stranded DNA construct is excised from a plasmid (e.g., a bacterial plasmid) and then circularized, e.g., by in vitro circularization.

### Producing the Anellovector

[2213] The genetic elements and vectors comprising the genetic elements prepared as described herein can be used in a variety of ways to express the anellovector in appropriate host cells. In some embodiments, the genetic element and vectors comprising the genetic element are transfected in appropriate host cells and the resulting RNA may direct the expression of the anellovector gene products, e.g., non-pathogenic protein and protein binding sequence, at high levels. Host cell systems which provide for high levels of expression include continuous cell lines that supply viral functions, such as cell lines superinfected with APV or MPV, respectively, cell lines engineered to complement APV or MPV functions, etc.

[2214] In some embodiments, the anellovector is produced as described in any of Examples 15 or 16. In some embodiments, the anellovector is produced as described in any of Examples 1, 2, 5, 6, or 15-17 of PCT Publication No. WO 2020/123816, incorporated by reference herein in its entirety.

[2215] In some embodiments, the anellovector is cultivated in continuous animal cell lines in vitro. According to one embodiment of the invention, the cell lines may include porcine cell lines. The cell lines envisaged in the context of the present invention include immortalised porcine cell lines such as, but not limited to the porcine kidney epithelial cell lines PK-15 and SK, the monomyeloid cell line 3D4/31 and the testicular cell line ST. Also, other mammalian cells lines are included, such as CHO cells (Chinese hamster ovaries), MARC-145, MDBK, RK-13, EEL. Additionally or alternatively, particular embodiments of the methods of the invention make use of an animal cell line which is an epithelial cell line, i.e. a cell line of cells of epithelial lineage. Cell lines susceptible to infection with anellovectors include, but are not limited to cell lines of human or primate origin, such as human or primate kidney carcinoma cell lines.

[2216] In some embodiments, the genetic elements and vectors comprising the genetic elements are transfected into cell lines that express a viral polymerase protein in order to achieve expression of the anellovector. To this end, transformed cell lines that express an anellovector polymerase protein may be utilized as appropriate host cells. Host cells may be similarly engineered to provide other viral functions or additional functions.

[2217] To prepare the anellovector disclosed herein, a genetic element or vector comprising the genetic element disclosed herein may be used to transfect cells which provide anellovector proteins and functions required for replication and production. Alternatively, cells may be transfected with helper virus before, during, or after transfection by the genetic element or vector comprising the genetic element disclosed herein. In some embodiments, a helper virus may be useful to complement production of an incomplete viral particle. The helper virus may have a conditional growth defect, such as host range restriction or temperature sensitivity, which allows the subsequent selection of transfectant viruses. In some embodiments, a helper virus may provide one or more replication proteins utilized by the host cells to achieve expression of the anellovector. In some embodiments, the host cells may be transfected with vectors encoding viral proteins such as the one or more replication proteins. In some embodiments, a helper virus comprises an antiviral sensitivity.

[2218] The genetic element or vector comprising the genetic element disclosed herein can be replicated and produced into anellovector particles by any number of techniques known in the art, as described, e.g., in U.S. Pat. Nos. 4,650,764; 5,166,057; 5,854,037; European Patent Publication EP 0702085A1; U.S. patent application Ser. No. 09/152,845; International Patent Publications PCT WO97/12032; WO96/34625; European Patent Publication EP-A780475; WO 99/02657; WO 98/53078; WO 98/02530; WO 99/15672; WO 98/13501; WO 97/06270; and EPO 780 47SA1, each of which is incorporated by reference herein in its entirety.

[2219] The production of anellovector-containing cell cultures according to the present invention can be carried out in different scales, such as in flasks, roller bottles or bioreactors. The media used for the cultivation of the cells to be infected are known to the skilled person and can generally comprise the standard nutrients required for cell viability, but may also comprise additional nutrients dependent on the cell type. Optionally, the medium can be protein-free and/or serum-free. Depending on the cell type the cells can be cultured in suspension or on a substrate. In some embodiments, different media is used for growth of the host cells and for production of anellovectors.

[2220] The purification and isolation of anellovectors can be performed according to methods known by the skilled person in virus production and is described for example by Rinaldi, et al., DNA Vaccines: Methods and Protocols (Methods in Molecular Biology), 3rd ed. 2014, Humana Press.

[2221] In one aspect, the present invention includes a method for the in vitro replication and propagation of the anellovector as described herein, which may comprise the following steps: (a) transfecting a linearized genetic element into a cell line sensitive to anellovector infection; (b) harvesting the cells and isolating cells showing the presence of the genetic element; (c) culturing the cells obtained in step (b) for at least three days, such as at least one week or longer, depending on experimental conditions and gene expression; and (d) harvesting the cells of step (c).

[2222] In some embodiments, an anellovector may be introduced to a host cell line grown to a high cell density. In some embodiments, the anellovector may be harvested and/or purified by separation of solutes based on biophysical properties, e.g., ion exchange chromatography or tangential flow filtration, prior to formulation with a pharmaceutical excipient.

### VIII. Administration/Delivery

[2223] The composition (e.g., a pharmaceutical composition comprising an anellovector or anelloVLP as described herein) may be formulated to include a pharmaceutically acceptable excipient. Pharmaceutical compositions may optionally comprise one or more additional active substances, e.g. therapeutically and/or prophylactically active substances. Pharmaceutical compositions of the present invention may be sterile and/or pyrogen-free. General considerations in the formulation and/or manufacture of pharmaceutical agents may be found, for example, in Remington: The Science and Practice of Pharmacy 21st ed., Lippincott Williams & Wilkins, 2005 (incorporated herein by reference).

[2224] Although the descriptions of pharmaceutical compositions provided herein are principally directed to pharmaceutical compositions which are suitable for administration to humans, it will be understood by the skilled artisan that such compositions are generally suitable for administration to any other animal, e.g., to non-human animals, e.g. non-human mammals. Modification of pharmaceutical compositions suitable for administration to humans in order to render the compositions suitable for administration to various animals is well understood, and the ordinarily skilled veterinary pharmacologist can design and/or perform such modification with merely ordinary, if any, experimentation. Subjects to which administration of the pharmaceutical compositions is contemplated include, but are not limited to, humans and/or other primates; mammals, including commercially relevant mammals such as cattle, pigs, horses, sheep, cats, dogs, mice, and/or rats; and/or birds, including commercially relevant birds such as poultry, chickens, ducks, geese, and/or turkeys.

[2225] Formulations of the pharmaceutical compositions described herein may be prepared by any method known or hereafter developed in the art of pharmacology. In general, such preparatory methods include the step of bringing the active ingredient into association with an excipient and/or one or more other accessory ingredients, and then, if necessary and/or desirable, dividing, shaping and/or packaging the product.

[2226] In one aspect, the invention features a method of delivering an anellovector or anelloVLP to a subject. The method includes administering a pharmaceutical composition comprising an anellovector or anelloVLP as described herein to the subject. In some embodiments, the administered anellovector or anelloVLP replicates in the subject (e.g., becomes a part of the virome of the subject).

[2227] The pharmaceutical composition may include wild-type or native viral elements and/or modified viral elements. The anellovector may include one or more of the sequences (e.g., nucleic acid sequences or nucleic acid sequences encoding amino acid sequences thereof) in any one of Tables N1-N32 or a sequence with at least about 60%, 65%, 70%, 75%, 80%, 85%, 90% 95%, 96%, 97%, 98% and 99% nucleotide sequence identity to any one of the nucleotide sequences or a sequence that is complementary to the sequence in any one of Tables N1-N32. The anellovector may comprise a nucleic acid molecule comprising a nucleic acid sequence with at least about 60%, 65%, 70%, 75%, 80%, 85%, 90% 95%, 96%, 97%, 98% and 99% sequence identity to one or more of the sequences in any one of Tables N1-N32. The anellovector may comprise a nucleic acid molecule encoding an amino acid sequence with at least about 60%, 65%, 70%, 75%, 80%, 85%, 90% 95%, 96%, 97%, 98% and 99% sequence identity to any one of the amino acid sequences in any one of Tables A1-A32. The anellovector may comprise a polypeptide comprising an amino acid sequence with at least about 60%, 65%, 70%, 75%, 80%, 85%, 90% 95%, 96%, 97%, 98% and 99% sequence identity to any one of the amino acid sequences in any one of Tables A1-A32. The anellovector may include one or more of the sequences in any one of Tables A1-A32 or N1-N32, or a sequence with at least about 60%, 65%, 70%, 75%, 80%, 85%, 90% 95%, 96%, 97%, 98% and 99% nucleotide sequence identity to any one of the nucleotide sequences or a sequence that is complementary to the sequence in any one of Tables N1-N32.

[2228] In some embodiments, the anellovector or anelloVLP is sufficient to increase (stimulate) endogenous gene and protein expression, e.g., at least about 5%, 10%, 15%, 20%, 25%, 30%, 35%, 40%, 45%, 50%, or more as compared to a reference, e.g., a healthy control. In certain embodiments, the anellovector or anelloVLP is sufficient to decrease (inhibit) endogenous gene and protein expression, e.g., at least about 5%, 10%, 15%, 20%, 25%, 30%, 35%, 40%, 45%, 50%, or more as compared to a reference, e.g., a healthy control.

[2229] In some embodiments, the anellovector or anelloVLP inhibits/enhances one or more viral properties, e.g., tropism, infectivity, immunosuppression/activation, in a host or host cell, e.g., at least about 5%, 10%, 15%, 20%, 25%, 30%, 35%, 40%, 45%, 50%, or more as compared to a reference, e.g., a healthy control.

[2230] In some embodiments, the subject is administered the pharmaceutical composition further comprising one or more viral strains that are not represented in the viral genetic information.

[2231] In some embodiments, the pharmaceutical composition comprising an anellovector or anelloVLP described herein is administered in a dose and time sufficient to modulate a viral infection. Some non-limiting examples of viral infections include adeno-associated virus, Aichi virus, Australian bat lyssavirus, BK polyomavirus, Banna virus, Barmah forest virus, Bunyamwera virus, Bunyavirus La Crosse, Bunyavirus snowshoe hare, Cercopithecine herpesvirus, Chandipura virus, Chikungunya virus, Cosavirus A, Cowpox virus, Coxsackievirus, Crimean-Congo hemorrhagic fever virus, Dengue virus, Dhori virus, Dugbe virus, Duvenhage virus, Eastern equine encephalitis virus, Ebolavirus, Echovirus, Encephalomyocarditis virus, Epstein-Barr virus, European bat lyssavirus, GB virus C/Hepatitis G virus, Hantaan virus, Hendra virus, Hepatitis A virus, Hepatitis B virus, Hepatitis C virus, Hepatitis E virus, Hepatitis delta virus, Horsepox virus, Human adenovirus, Human astrovirus, Human coronavirus, Human cytomegalovirus, Human enterovirus 68, Human enterovirus 70, Human herpesvirus 1, Human herpesvirus 2, Human herpesvirus 6, Human herpesvirus 7, Human herpesvirus 8, Human immunodeficiency virus, Human papillomavirus 1, Human papillomavirus 2, Human papillomavirus 16, Human papillomavirus 18, Human parainfluenza, Human parvovirus B19, Human respiratory syncytial virus, Human rhinovirus, Human SARS coronavirus, Human spumaretrovirus, Human T-lymphotropic virus, Human torovirus, Influenza A virus, Influenza B virus, Influenza C virus, Isfahan virus, JC polyomavirus, Japanese encephalitis virus, Junin arenavirus, KI Polyomavirus, Kunjin virus, Lagos bat virus, Lake Victoria marburgvirus, Langat virus, Lassa virus, Lordsdale virus, Louping ill virus, Lymphocytic choriomeningitis virus, Machupo virus, Mayaro virus, MERS coronavirus, Measles virus, Mengo encephalomyocarditis virus, Merkel cell polyomavirus, Mokola virus, Molluscum contagiosum virus, Monkeypox virus, Mumps virus, Murray valley encephalitis virus, New York virus, Nipah virus, Norwalk virus, O'nyong-nyong virus, Orf virus, Oropouche virus, Pichinde virus, Poliovirus, Punta toro phlebovirus, Puumala virus, Rabies virus, Rift valley fever virus, Rosavirus A, Ross river virus, Rotavirus A, Rotavirus B, Rotavirus C, Rubella virus, Sagiyama virus, Salivirus A, Sandfly fever sicilian virus, Sapporo virus, Semliki forest virus, Seoul virus, Simian foamy virus, Simian virus 5, Sindbis virus, Southampton virus, St. louis encephalitis virus, Tick-borne powassan virus, Torque teno virus, Toscana virus, Uukuniemi virus, Vaccinia virus, Varicella-zoster virus, Variola virus, Venezuelan equine encephalitis virus, Vesicular stomatitis virus, Western equine encephalitis virus, WU polyomavirus, West Nile virus, Yaba monkey tumor virus, Yaba-like disease virus, Yellow fever virus, and Zika Virus. In certain embodiments, the anellovector or anelloVLP is sufficient to outcompete and/or displace a virus already present in the subject, e.g., at least about 5%, 10%, 15%, 20%, 25%, 30%, 35%, 40%, 45%, 50%, or more as compared to a reference. In certain embodiments, the anellovector or anelloVLP is sufficient to compete with chronic or acute viral infection. In certain embodiments, the anellovector or anelloVLP may be administered prophylactically to protect from viral infections (e.g. a provirotic). In some embodiments, the anellovector or anelloVLP is in an amount sufficient to modulate (e.g., phenotype, virus levels, gene expression, compete with other viruses, disease state, etc. at least about 5%, 10%, 15%, 20%, 25%, 30%, 35%, 40%, 45%, 50%, or more).

### Ocular Delivery

[2232] In some embodiments, a composition (e.g., an Anelloviridae family vector (e.g., anellovector) or pharmaceutical composition) or method described herein involves an ocular delivery system, such as the Orbit Subretinal Delivery System. Briefly, such a delivery system may comprise a cannula to be inserted into the eye for delivering the Anelloviridae family vector (e.g., anellovector) into the eye, a device body for delivering saline solution or Anelloviridae family vector (e.g., anellovector) to the cannula, a first line for delivering the saline solution to the device body, and a second line for delivering the Anelloviridae family vector (e.g., anellovector) to the device body. More particularly, in some embodiments, the delivery system is provided as three “sets”. The first set is a subretinal injection device set comes with a subretinal injection device, which comprises a cannula tip/needle, a needle advancement knob, a subretinal injection device body (with a magnet), a dose line luer, and a BSS line luer. The system can also comprise with a magnetic pad and an ophthalmic marker. The magnet provides stabilization during injection. The second set (which can be referred to as the tubing set) includes tubing assembly, a BSS syringe, two syringe snap collars, and a CPC adapter. The third set (which can be referred to as the dosing set) comprises a dose syringe and a tubing clamp.

[2233] For the subretinal injection device, the internal needle is connected to the needle advancement knob, which is connected to the subretinal injection device body. This has two lines, each attaching to either the BSS line luer or the dose line luer.

[2234] Accordingly, in some embodiments, a composition (e.g., an Anelloviridae family vector (e.g., anellovector) or pharmaceutical composition) described herein is situated in an ocular delivery system. The ocular delivery system may comprise, for example:
[2235] a) a cannula comprising a first end and a second end, wherein the first end of the cannula optionally comprises a needle,
[2236] b) a device body which optionally comprises a magnet, wherein the second end of the cannula is operably connected to the device body,
[2237] c) needle advancement knob situated on the device body, wherein the needle advancement knob can be adjusted by a user to advance the needle to extend beyond the first end of the cannula, e.g., extend into the subretinal space;
[2238] d) a first line operably attached to the connected to device body (e.g., attached with a luer), wherein the first line may be used to deliver a wash solution, e.g., a saline solution, e.g., BSS, wherein optionally the first line is operably connected to a first syringe (e.g., connected using a syringe snap collar);
[2239] e) a second line operably attached to the connected to device body (e.g., attached with a luer), wherein the second line may be used to deliver a composition (e.g., an Anelloviridae family vector (e.g., anellovector) or pharmaceutical composition) described herein, wherein optionally the second line is operably connected to a second syringe (e.g., connected using a syringe snap collar).

[2240] In some embodiments, the ocular delivery system is part of a kit. The kit may further comprise one or both of a magnetic pad and an ophthalmic marker.

[2241] In some embodiments, a method described herein comprises administering a composition described herein (e.g., an Anelloviridae family vector (e.g., anellovector) or pharmaceutical composition) using an ocular delivery system, e.g., the ocular delivery system described above. In some embodiments, the method comprises surgically preparing the eye for administration of the composition, e.g., by exposing the sclera (e.g., by conjunctival peritomy), optionally transferring ink to the sclera to create a suturing template, creating a suture loop, and creating a sclerotomy. The cannula may be inserted into the sclerotomy. The ocular delivery system may be placed. For instance, the magnetic pad may be placed on the subject's forehead, and the device body may be placed on the magnetic pad, e.g., in the same meridian as the sclerotomy. The first end of the cannula may be positioned directly above the opposite edge of the cornea. Cannulation may be performed. For instance, the suture loops may be lifted and the cannula may be passed through the suture loops. The device body may be slid toward the eye. The cannula may be inserted into the sclerotomy. The needle may be advanced into the subretinal space using the needle advancement knob. A saline solution (e.g., BSS) may be administered, e.g., using the syringe connected to the first line. The saline solution may form a visible bleb. The Anelloviridae family vector (e.g., anellovector) or pharmaceutical composition may be administered, e.g., using the syringe connected to the second line. The Anelloviridae family vector (e.g., anellovector) or pharmaceutical composition may be released into the bleb. The needle may then be retracted. The ocular delivery system may be removed from the eye.

[2242] The delivery method may also comprise one or more of the following steps.

[2243] The BSS syringe of the tubing set is attached to the delivery system via the BSS line of the subretinal injection device. A plunger is inserted into the dose syringe, followed by attachment of a sterile needle to the dose syringe.

[2244] A plunger is also inserted into the dose syringe, and a sterile needle is attached to the dose syringe. This needle is then inserted into the vial and is used to aspirate the subretinal infusate into the syringe. The needle is then removed.

[2245] The tab is then rotated into the latched position in order to prime the dose line. The dose syringe is attached to the dose line of the Subretinal injection device. The dose syringe plunger is then advanced slowly until it reaches a hard stop and a tactile click is reached. This primes the dose line and the dose syringe assures the correct subretinal dose volume is ready for injection into the subretinal area.

[2246] If using pneumatic injection, the plunger is to be rotated counterclockwise to remove the threaded rod from the BSS syringe and leave the seal in the BSS syringe. The tubing is to be inserted in the open barrel of the BSS syringe and secured in place by sliding the syringe snap collar over both components. The tubing assembly is then attached to the pneumatic source of choice (e.g., a vitrectomy machine) using the CPC adaptor, if necessary. The viscous fluid control injection pressure is to be set to 36 psi.

[2247] The provided tubing claims supplied with the subretinal delivery system are only to be used with an alternate dose syringe (not supplied in the set) that is validated for use with the Orbit SDS. The alternate syringe's labeling must indicate that it is validated for use with the Orbit SDS and include instructions for use with the Orbit SDS. If using an alternate dose syringe, the tubing clamp is placed on the dose line following priming to prevent potential backflow into the alternate dose syringe during BSS syringe use. Immediately before injecting the infusate, the tubing clamp is to be removed.

### Exemplary Surgical Steps:

[2248] The site it prepared by inserting the lid speculum, and inserting a valved port for the chandelier. The eye is rotated inferonasally to expose the superotemporal quadrant, and a conjunctival peritomy is performed to expose the sclera. A cannulation path that does not interfere with identified vortex veins or long posterior ciliary neurovascular bundles is selected. Ink is applied to the tips of the ophthalmic marker with the limbus, and gently press it against the sclera to transfer the ink. After drying the scleral surface, the marker is aligned with the limbus and is gently pressed against the sclera to transfer ink, and thereby creating the suturing template (about 10 ink dots). The suture loop is created. A sclerotomy is performed.

### Exemplary Device Placement:

[2249] The adhesive backing is removed from the magnetic pad, and the pad is placed over the sterile fenestrated drape, on top of the patient's forehead. The primed subretinal injection device body on top of the magnetic pad is placed in the same meridian as the sclerotomy. The distal tip of the subretinal injection cannula is positioned directly above the opposite edge of the cornea to ensure sufficient slack for advancement. The needle is advanced and the flow of BSS or BSS PLUS is checked. The needle is fully retracted.

### Exemplary Cannulation:

[2250] Using smooth forceps, the flexible cannula is grasped, approximately 10 mm from the distal tip. Using toothed forceps on the eye to help with insertion, the suture loops are lifted and then the posterior lip of the sclerotomy is grasped. The cannula is passed through the suture loops. Prior to insertion, the subretinal injection device body is slid toward the eye to provide additional slack and maintain a tangential path to the eye's curvature. While grapsing the center of the posterior lip of the sclerotomy and pulling away from the eye, the flexible cannula is inserted into the sclerotomy. The eye is rotated back to the neutral axis.

### Exemplary Method for Using Clearside Biomedical SCS Microinjector:

[2251] In some embodiments, a composition (e.g., an Anelloviridae family vector (e.g., anellovector) or pharmaceutical composition) or method described herein involves an ocular delivery system, such as an SCS microinjector. Briefly, such a delivery system may comprise a needle sized appropriately to deliver an Anelloviridae family vector (e.g., anellovector) to the suprachoroidal space, a chamber to contain the Anelloviridae family vector (e.g., anellovector), and a plunger to administer the Anelloviridae family vector (e.g., anellovector). In some embodiments, the microinjector is comprised of a needle of various lengths (needle length is printed on the needle—either 900 um or 1100 um). The needle is a 30 gauge needle. The needle is connected to a conjunctiva compressing hub, which is connected to a chamber (e.g., a barrel), which has a 100 uL capacity and has indicators in increments of 25 uL. The barrel is connected to a plunger and plunger handle to inject the drug. The microinjector also comes with a needle safety cap with integrated fixed length calipers of 4.5 mm.

[2252] The Clearside SCS microinjector is designed for suprachoroidal drug delivery.

[2253] Accordingly, in some embodiments, a composition (e.g., an Anelloviridae family vector (e.g., anellovector) or pharmaceutical composition) described herein is situated in an ocular delivery system.

[2254] The ocular delivery system may comprise:
[2255] a) a needle, e.g., a 30 gauge needle, wherein optionally the needle is 800-1200 um (e.g., about 900 um or 1100 um in length);
[2256] b) optionally, a conjunctiva compressing hub connected to the needle;
[2257] c) a chamber connected to one or both of the conjunctiva compressing hub and the needle; and
[2258] d) optionally, a plunger connected to the chamber.

[2259] In some embodiments, the ocular delivery system is part of a kit. The kit may further comprise, one or both of a needle safety cap and calipers.

[2260] In some embodiments, a method described herein comprises administering a composition described herein (e.g., an Anelloviridae family vector (e.g., anellovector) or pharmaceutical composition) using an ocular delivery system, e.g., the ocular delivery system described above. In some embodiments, the method comprises inserting the needle into the suprachoroidal space and administering the Anelloviridae family vector (e.g., anellovector) or pharmaceutical composition into the suprachoroidal space.

[2261] In one aspect, the invention features a method of delivering an Anelloviridae family vector (e.g., anellovector) to a subject, e.g., to an eye of a subject (e.g., to a photoreceptor, retina, posterior eye cup (PEC), retinal ganglion, optic nerve, optic nerve head, subretinal space, intravitreal space, or retinal pigmented epithelium (RPE) of the subject). The method includes administering a pharmaceutical composition comprising an Anelloviridae family vector (e.g., anellovector) as described herein to the subject, e.g., to an eye of a subject (e.g., to a photoreceptor, retina, posterior eye cup (PEC), retinal ganglion, optic nerve, optic nerve head, subretinal space, intravitreal space, or retinal pigmented epithelium (RPE) of the subject). In some embodiments, the administered Anelloviridae family vector (e.g., anellovector) replicates in the subject (e.g., becomes a part of the virome of the subject).

[2262] In some embodiments, the method of delivering an Anelloviridae family vector (e.g., anellovector) to a subject comprises contacting the Anelloviridae family vector (e.g., anellovector) to any suitable ocular cell. Ocular cells associated with age-related macular degeneration include, but are not limited to, cells of neural origin, cells of all layers of the retina, especially retinal pigment epithelial cells, glial cells, and pericytes. Other ocular cells that can be contacted as a result of the inventive method include, for example, endothelial cells, iris epithelial cells, corneal cells, ciliary epithelial cells, Mueller cells, astrocytes, muscle cells surrounding and attached to the eye (e.g., cells of the lateral rectus muscle), fibroblasts (e.g., fibroblasts associated with the episclera), orbital fat cells, cells of the sclera and episclera, connective tissue cells, muscle cells, and cells of the trabecular meshwork. Other cells linked to various ocular-related diseases include, for example, fibroblasts and vascular endothelial cells.

[2263] Generally, the vector can be delivered in the form of a suspension injected intraocularly (subretinally) under direct observation using an operating microscope. This procedure may involve vitrectomy followed by injection of vector suspension using a fine cannula through one or more small retinotomies into the subretinal space.

[2264] Briefly, an infusion cannula can be sutured in place to maintain a normal globe volume by infusion (of e.g. saline) throughout the operation. A vitrectomy is performed using a cannula of appropriate bore size (for example 20 to 27 gauge), wherein the volume of vitreous gel that is removed is replaced by infusion of saline or other isotonic solution from the infusion cannula. The vitrectomy is advantageously performed because (1) the removal of its cortex (the posterior hyaloid membrane) facilitates penetration of the retina by the cannula; (2) its removal and replacement with fluid (e.g. saline) creates space to accommodate the intraocular injection of vector, and (3) its controlled removal reduces the possibility of retinal tears and unplanned retinal detachment.

[2265] In some embodiments, the vector is directly injected into the subretinal space outside the central retina, by utilizing a cannula of the appropriate bore size (e.g. 27-45 gauge), thus creating a bleb in the subretinal space. In other embodiments, the subretinal injection of vector suspension is preceded by subretinal injection of a small volume (e.g. about 0.1 to about 0.5 ml) of an appropriate fluid (such as saline or Ringer's solution) into the subretinal space outside the central retina. This initial injection into the subretinal space establishes an initial fluid bleb within the subretinal space, causing localized retinal detachment at the location of the initial bleb. This initial fluid bleb can facilitate targeted delivery of vector suspension to the subretinal space (by defining the plane of injection prior to vector delivery), and minimize possible vector administration into the choroid and the possibility of vector injection or reflux into the vitreous cavity. In some embodiments, this initial fluid bleb can be further injected with fluids comprising one or more vector suspensions and/or one or more additional therapeutic agents by administration of these fluids directly to the intial fluid bleb with either the same or additional fine bore cannulas.

[2266] Intraocular administration of the vector suspension and/or the initial small volume of fluid can be performed using a fine bore cannula (e.g. 21-A5 gauge) attached to a syringe. In some embodiments, the plunger of this syringe may be driven by a mechanised device, such as by depression of a foot pedal. The fine bore cannula is advanced through the sclerotomy, across the vitreous cavity and into the retina at a site pre-determined in each subject according to the area of retina to be targeted (but outside the central retina). Under direct visualisation the vector suspension is injected mechanically under the neurosensory retina causing a localised retinal detachment with a self-sealing non-expanding retinotomy. As noted above, the vector can be either directly injected into the subretinal space creating a bleb outside the central retina or the vector can be injected into an initial bleb outside the central retina, causing it to expand (and expanding the area of retinal detachment). In some embodiments, the injection of vector suspension is followed by injection of another fluid into the bleb.

[2267] Without wishing to be bound by theory, the rate and location of the subretinal injection(s) can result in localized shear forces that can damage the macula, fovea and/or underlying RPE cells. The subretinal injections may be performed at a rate that minimizes or avoids shear forces. In some embodiments, the vector is injected over about 15-17 minutes. In some embodiments, the vector is injected over about 17-20 minutes. In some embodiments, the vector is injected over about 20-22 minutes. In some embodiments, the vector is injected at a rate of about 35 to about 65 μl/ml. In some embodiments, the vector is injected at a rate of about 35 μl/ml. In some embodiments, the vector is injected at a rate of about 40 μl/ml. In some embodiments, the vector is injected at a rate of about 45 μl/ml. In some embodiments, the vector is injected at a rate of about 50 μl/ml. In some embodiments, the vector is injected at a rate of about 55 μl/ml. In some embodiments, the vector is injected at a rate of about 60 μl/ml. In some embodiments, the vector is injected at a rate of about 65 μl/ml. One of ordinary skill in the art would recognize that the rate and time of injection of the bleb may be directed by, for example, the volume of the vector or size of the bleb necessary to create sufficient retinal detachment to access the cells of central retina, the size of the cannula used to deliver the vector, and the ability to safely maintain the position of the canula of the invention.

[2268] One or multiple (e.g. 2, 3, or more) blebs can be created. Generally, the total volume of bleb or blebs created by the methods and systems of the invention can not exceed the fluid volume of the eye, for example about 4 ml in a typical human subject. The total volume of each individual bleb is preferably at least about 0.3 ml, and more preferably at least about 0.5 ml in order to facilitate a retinal detachment of sufficient size to expose the cell types of the central retina and create a bleb of sufficient dependency for optimal manipulation. One of ordinary skill in the art will appreciate that in creating the bleb according to the methods and systems of the invention that the appropriate intraocular pressure must be maintained in order to avoid damage to the ocular structures. The size of each individual bleb may be, for example, about 0.5 to about 1.2 ml, about 0.8 to about 1.2 ml, about 0.9 to about 1.2 ml, about 0.9 to about 1.0 ml, about 1.0 to about 2.0 ml, about 1.0 to about 3.0 ml. Thus, in one example, to inject a total of 3 ml of vector suspension, 3 blebs of about 1 ml each can be established. The total volume of all blebs in combination may be, for example, about 0.5 to about 3.0 ml, about 0.8 to about 3.0 ml, about 0.9 to about 3.0 ml, about 1.0 to about 3.0 ml, about 0.5 to about 1.5 ml, about 0.5 to about 1.2 ml, about 0.9 to about 3.0 ml, about 0.9 to about 2.0 ml, about 0.9 to about 1.0 ml.

[2269] In order to safely and efficiently transduce areas of target retina (e.g. the central retina) outside the edge of the original location of the bleb, the bleb may be manipulated to reposition the bleb to the target area for transduction. Manipulation of the bleb can occur by the dependency of the bleb that is created by the volume of the bleb, repositioning of the eye containing the bleb, repositioning of the head of the human with an eye or eyes containing one or more blebs, and/or by means of a fluid-air exchange. This is particularly relevant to the central retina since this area typically resists detachment by subretinal injection. In some embodiments fluid-air exchange is utilized to reposition the bleb; fluid from the infusion cannula is temporarily replaced by air, e.g. from blowing air onto the surface of the retina. As the volume of the air displaces vitreous cavity fluid from the surface of the retina, the fluid in the vitreous cavity may flow out of a cannula. The temporary lack of pressure from the vitreous cavity fluid causes the bleb to move and gravitate to a dependent part of the eye. By positioning the eye globe appropriately, the bleb of subretinal vector is manipulated to involve adjacent areas (e.g. the macula and/or fovea). In some cases, the mass of the bleb is sufficient to cause it to gravitate, even without use of the fluid-air exchange. Movement of the bleb to the desired location may further be facilitated by altering the position of the subject's head, so as to allow the bleb to gravitate to the desired location in the eye. Once the desired configuration of the bleb is achieved, fluid is returned to the vitreous cavity. The fluid is an appropriate fluid, e.g., fresh saline. Generally, the subretinal vector may be left in situ without retinopexy to the retinotomy and without intraocular tamponade, and the retina will spontaneously reattach within about 48 hours.

[2270] The composition is administered directly to the eye of a mammal, such as, for example, a mouse, a rat, a non-human primate, or a human. Any administration route is appropriate so long as the composition contacts an appropriate ocular cell. The composition can be appropriately formulated and administered in the form of an injection, eye lotion, ointment, implant, and the like. The composition can be administered, for example, topically, intracamerally, subconjunctivally, intraocularly, retrobulbarly, periocularly (e.g., subtenon delivery), subretinally, or suprachoroidally. Topical formulations are well known in the art. Patches, corneal shields (see, e.g., U.S. Pat. No. 5,185,152), ophthalmic solutions (see, e.g., U.S. Pat. No. 5,710,182), and ointments also are known in the art and can be used in the context of the inventive method. The composition also can be administered non-invasively using a needleless injection device, such as the Biojector 2000 Needle-Free Injection Management SystemT^{M} available from Bioject Medical Technologies Inc. (Tigard, Oreg.).

[2271] Alternatively, the composition can be administered using invasive procedures, such as, for instance, intravitreal injection or subretinal injection, optionally preceded by a vitrectomy, or periocular (e.g., subtenon) delivery. The composition can be injected into different compartments of the eye, e.g., the vitreal cavity or anterior chamber. Preferably, the composition is administered intravitreally, most preferably by intravitreal injection.

[2272] In some embodiments, the composition may be administered using an ocular delivery system comprising the use of a microneedle (U.S. Pat. No. 8,808,225, incorporated herein in its entirety).

[2273] In some embodiments, a method of treating a human subject diagnosed with a disease or disorder of the eye (e.g., nAMD, wet AMD, dry AMD, retinal vein occlusion (RVO), diabetic macular edema (DME), or diabetic retinopathy (DR)), comprises delivering to the retina or posterior eye cup (PEC) of said human subject a therapeutically effective amount of anti-hVEGF antigen-binding fragment, by administering to the intravitreal space, suprachoroidal space, subretinal space, or outer surface of the sclera in the eye of said human subject (e.g., by suprachoroidal injection (for example, via a suprachoroidal drug delivery device such as a microinjector with a microneedle), subretinal injection via transvitreal approach (a surgical procedure), subretinal administration via the suprachoroidal space (for example, a surgical procedure via a subretinal drug delivery device comprising a catheter that can be inserted and tunneled through the suprachoroidal space toward the posterior pole, where a small needle injects into the subretinal space), or a posterior juxtascleral depot procedure (for example, via a juxtascleral drug delivery device comprising a cannula whose tip can be inserted and kept in direct apposition to the scleral surface)) an expression vector encoding the anti-hVEGF antigen-binding fragment. In a specific aspect, described herein are methods of treating a human subject diagnosed with nAMD, dry AMD, retinal vein occlusion (RVO), diabetic macular edema (DME), or diabetic retinopathy (DR) (in particular, wet AMD), comprising delivering to the retina or posterior eye cup (PEC) of said human subject a therapeutically effective amount of anti-hVEGF antigen-binding fragment, by the use of a suprachoroidal drug delivery device such as a microinjector. In a specific aspect, described herein are methods of treating a human subject diagnosed with neovascular age-related macular degeneration (nAMD), dry AMD, retinal vein occlusion (RVO), diabetic macular edema (DME), or diabetic retinopathy (DR) (in particular, wet AMD), comprising delivering to the retina or posterior eye cup (PEC) of said human subject a therapeutically effective amount of anti-hVEGF antigen-binding fragment, wherein the human subject has a Best-Corrected Visual Acuity (BCVA) that is ≤20/20 and ≥20/400.

[2274] In some embodiments, a disease, disorder, or condition (e.g., as described herein) is treated by intravitreal administration of an Anelloviridae family vector as described herein. In some embodiments, a disease, disorder, or condition (e.g., as described herein) is treated by subretinal administration of an Anelloviridae family vector as described herein. In some embodiments, a disease, disorder, or condition (e.g., as described herein) is treated by suprachoroidal administration of an Anelloviridae family vector as described herein.

### Redosing

[2275] The anellovectors or anelloVLPs described herein can, in some instances, be used as a delivery vehicle that can be administered in multiple doses (e.g., doses administered separately). While not wishing to be bound by theory, in some embodiments, an anellovector or anelloVLP (e.g., as described herein) induces a relatively low immune response (as measured, for example, as 50% GMT values), e.g., allowing for repeated dosing of a subject with one or more anellovectors or anelloVLPs (e.g., multiple doses of the same anellovector or anelloVLP or different anellovectors or anelloVLPs). In an aspect, the invention provides a method of delivering an effector, comprising administering to a subject a first plurality of anellovectors or anelloVLPs and then a second plurality of anellovectors or anelloVLPs. In some embodiments, the second plurality of anellovectors or anelloVLPs comprise the same proteinaceous exterior as the anellovectors or anelloVLPs of the first plurality. In another aspect, the invention provides a method of selecting a subject (e.g., a human subject) to receive an effector, wherein the subject previously received, or was identified as having received, a first plurality of anellovectors or anelloVLPs comprising a genetic element encoding an effector, in which the method involves selecting the subject to receive a second plurality of anellovectors or anelloVLPs comprising a genetic element encoding an effector (e.g., the same effector as that encoded by the genetic element of the first plurality of anellovectors or anelloVLPs, or a different effector as that encoded by the genetic element of the first plurality of anellovectors or anelloVLPs). In another aspect, the invention provides a method of identifying a subject (e.g., a human subject) as suitable to receive a second plurality of anellovectors or anelloVLPs, the method comprising identifying the subject has having previously received a first plurality of anellovectors or anelloVLPs comprising a genetic element encoding an effector, wherein the subject being identified as having received the first plurality of anellovectors or anelloVLPs is indicative that the subject is suitable to receive the second plurality of anellovectors or anelloVLPs.

[2276] In some embodiments, the second plurality of anellovectors or anelloVLPs comprises a proteinaceous exterior with at least one surface epitope in common with the anellovectors or anelloVLPs of the first plurality of anellovectors or anelloVLPs. In some embodiments, the anellovectors or anelloVLPs of the first plurality and the anellovectors or anelloVLPs of the second plurality carry genetic elements encoding the same effector. In some embodiments, the anellovectors or anelloVLPs of the first plurality and the anellovectors or anelloVLPs of the second plurality carry genetic elements encoding different effectors.

[2277] In some embodiments, the second plurality comprises about the same quantity and/or concentration of anellovectors or anelloVLPs as the first plurality (e.g., when normalized to the body mass of the subject at the time of administration), e.g., the second plurality comprises 90-110%, e.g., 95-105% of the number of anellovectors or anelloVLPs in the first plurality when normalized to body mass of the subject at the time of administration. In some embodiments, wherein the first plurality comprises a greater dosage of anellovectors or anelloVLPs than the second plurality, e.g., wherein the first plurality comprises a greater quantity and/or concentration of anellovectors or anelloVLPs relative to the second plurality. In some embodiments, wherein the first plurality comprises a lower dosage of anellovectors or anelloVLPs than the second plurality, e.g., wherein the first plurality comprises a lower quantity and/or concentration of anellovectors or anelloVLPs relative to the second plurality.

[2278] In some embodiments, the subject is evaluated between the administration of the first and second pluralities of anellovectors or anelloVLPs, e.g., for the presence (e.g., persistence) of anellovectors or anelloVLPs from the first plurality, or progeny thereof. In some embodiments, the subject is administered the second plurality of anellovectors or anelloVLPs if the presence of anellovectors or anelloVLPs from the first plurality, or the progeny thereof, are not detected.

[2279] In some embodiments, the second plurality is administered to the subject at least 1, 2, 3, or 4 weeks, or 1, 2, 3, 4, 5, 6, 7, 8, 9, 10, 11, or 12 months, or 1, 2, 3, 4, 5, 10, or 20 years after the administration of the first plurality to the subject. In some embodiments, the second plurality is administered to the subject between 1-2 weeks, 2-3 weeks, 3-4 weeks, 1-2 months, 3-4 months, 4-5 months, 5-6 months, 6-7 months, 7-8 months, 8-9 months, 9-10 months, 10-11 months, 11-12 months, 1-2 years, 2-3 years, 3-4 years, 4-5 years, 5-10 years, or 10-20 years after the administration of the first plurality to the subject. In some embodiments, the method comprises administering a repeated dose of anellovectors or anelloVLPs over the course of at least 1, 2, 3, 4, or 5 years.

[2280] In some embodiments, the method further comprises assessing, after administration of the first plurality and before administration of the second plurality, one or more of:
[2281] a) the level or activity of the effector in the subject (e.g., by detecting a protein effector, e.g., by ELISA; by detecting a nucleic acid effector, e.g., by RT-PCR, or by detecting a downstream effect of the effector, e.g., level of an endogenous gene affected by the effector);
[2282] b) the level or activity of the anellovector or anelloVLP of the first plurality in the subject (e.g., by detecting the level of the VP1 of the anellovector or anelloVLP);
[2283] c) the presence, severity, progression, or a sign or symptom of a disease in the subject that the anellovector or anelloVLP was administered to treat; and/or
[2284] d) the presence or level of an immune response, e.g., neutralizing antibodies, against an anellovector or anelloVLP.

[2285] In some embodiments, the method further comprises administering to the subject a third, fourth, fifth, and/or further plurality of anellovectors or anelloVLPs, e.g., as described herein.

[2286] In some embodiments, the first plurality and the second plurality are administered via the same route of administration, e.g., intravenous administration. In some embodiments, the first plurality and the second plurality are administered via different routes of administration. In some embodiments, the first and the second pluralities are administered by the same entity (e.g., the same health care provider). In some embodiments, the first and the second pluralities are administered by different entities (e.g., different health care providers).

[2287] All references and publications cited herein are hereby incorporated by reference.

[2288] The following examples are provided to further illustrate some embodiments of the present invention, but are not intended to limit the scope of the invention; it will be understood by their exemplary nature that other procedures, methodologies, or techniques known to those skilled in the art may alternatively be used. Additional examples can be found, for example, in PCT Publication No. WO 2020/123816, incorporated by reference herein in its entirety.

### EXAMPLES

### Table of Contents

[2289] Example 1: Expression of ORF1 constructs for conjugation
[2290] Example 2: Conjugation of peptides via NHS click chemistry
[2291] Example 3: Conjugation of polypeptides via two-step click chemistry
[2292] Example 4: Conjugation of polypeptides via maleimide conjugation
[2293] Example 5: Genetic grafting of surface effector to the VLP surface
[2294] Example 6: Generation of circular ssDNA transgene for in vitro assembly of Anellovectors
[2295] Example 7: Anellovector ORF1 VLP expression in insect or mammalian cells and purification
[2296] Example 8: Expression of Ring2 and Ring10 Anellovirus ORF1s in insect cells
[2297] Example 9: Expression of CAV capsid protein VP1 in mammalian cells
[2298] Example 10: Expression of Ring2 ORF1 and ORF2 in insect cells
[2299] Example 11: Disassembly of Ring2 VLPs using urea
[2300] Example 12: Dissociation of Anellovirus VLPs and reassembly around nucleic acid cargoes
[2301] Example 13: Replication-deficient anellovectors and helper viruses
[2302] Example 14: Manufacturing process for replication-competent anellovectors
[2303] Example 15: Manufacturing process of replication-deficient anellovectors: recovery and scaling up of production of replication-deficient anellovectors
[2304] Example 16: Production of anellovectors using suspension cells: production of anellovectors in cells in suspension.
[2305] Example 17: Antibody generation and western blot analysis
[2306] Example 18: Construct design, cell culture and protein expression/purification
[2307] Example 19: Negative-stained EM data collection and analysis
[2308] Example 20: Cryo-EM data collection and data analysis and molecular refinement
[2309] Example 21: Circular dichroism spectroscopy
[2310] Example 22: Anellovirus particle structure
[2311] Example 23: Anellovirus jelly roll domains
[2312] Example 24: Anellovirus spike domains
[2313] Example 25: Evasion of immune system
[2314] Example 26: Grafting of HVR helix motif between Anellovirus ORF1 proteins
[2315] Example 27: Production and purification of AnelloVLPs
[2316] Example 28: Conjugation of AnelloVLPs
[2317] Example 29: VLP conjugation to SARS-CoV-2 RBD peptide
[2318] Example 30. Ring19-eGFP Anellovector transduces eye tissue in vivo
[2319] Example 31. Expression of GFP protein in human RPE cells after transduction with engineered Ring19 Anellovector
[2320] Example 32. Transduction of ocular tissue with varying doses of Ring19-eGFP
[2321] Example 33. A Cre recombinase based three-plasmid system for Anelloviridae family vector particle production
[2322] Example 34. A Bxb1 recombinase based three-plasmid system for anellovector viral particle production
[2323] Example 35. Different promoters can drive transgene expression in the Cre and Bxb1 recombinase systems
[2324] Example 36. Enhancing vector production using alternative origins of replication
[2325] Example 37. A recombinase based two-plasmid system for Anelloviridae family vector particle production
[2326] Example 38. Isolation of cssDNA using nicking enzymes and exonuclease digest
[2327] Example 39. Isolation of cssDNA from a Ring19-eGFP minicircle using nicking enzymes and exonuclease digest
[2328] Example 40. Isolation of cssDNA from a Ring2-eGFP minicircle using nicking enzymes and exonuclease digest
[2329] Example 41. Production of minicircles in bacterial cells using a recombinase system
[2330] Example 42. Use of minicircles for production of Anelloviridae family vector particles
[2331] Example 43. Removing homology between the vector and SRR plasmids reduces production of wild-type (WT) Anelloviridae family viral genomes
[2332] Example 44. Self-replicating rescue (SRR) plasmid configurations
[2333] Example 45. Knocking out expressing of ORF1 in the self-replicating rescue (SRR) plasmid does not affect expression of other ORF proteins and splice variants
[2334] Example 46. The Ring19 genetic element is successfully packaged by other Ring ORF1 molecules
[2335] Example 47. In vivo transduction of cross-packaged R2 ORF1 and Ring19 genetic element Anellovector

### Example 1. Expression of ORF1 Constructs for Conjugation

[2336] In nature, Anelloviruses encapsidate circularized negative sense (ns) single stranded (ss) DNA genomes in part through interactions between the genome and the N-terminal arginine rich motif (ARM). UV absorption evidence suggests recombinant ORF1 containing the ARM forms virus like particles (VLPs) that are bound to nucleic acids, presumably non-specific host cell DNA fragments. To remove these potentially undesired host cell impurities, ORF1 constructs are generated in which the ARM is deleted (delARM ORF1).

Expression of Arginine-Rich Region Deletion (delARM) ORF1 Constructs

[2337] In one example, a delARM mutant was generated for the Ring 10 ORF1 protein, which was then produced in Sf9 insect cells. Without wishing to be bound by theory, this VLP may not contain the same level of host cell nucleic acid impurities as the structural arginine-rich region, also referred to herein as the structural arginine-rich motif (ARM; also referred to herein as the structural arginine-rich region), is removed (referred to herein as “delARM”). Ring 10 delARM ORF1 is expressed with the complete C-terminal region present. During purification, the structural C-terminal domain or a portion thereof is clipped by protease activity resulting in a C-terminal deletion delARM construct.

[2338] Anellovirus ORF1 molecules, such as an ORF1 protein in which the ARM has been deleted, harbor a basic residue (lysine) on the particle surface which would be suitable for conjugating surface effectors including peptides, proteins such as antibodies, glycan groups or neuclic acid entities which are covalently bound to N-hydroxysuccinimide (NHS). NHS is a click-chemistry which binds to amino groups such as those located on lysine residues.

### Expression of C-Terminal Deletion ORF1 Constructs

[2339] Recombinant ORF1s do not need the C-terminal region to form VLPs. While the biological role of the C-terminal region has yet to be elucidated regarding virus formation or viral infection, we have demonstrated that the C-terminal region can be removed and permit efficient VLP formation. One example is the Ring 2 ORF1 C-terminal truncation at residue 611 generated in 293 cells (e.g., as listed in Table B1-3a). After observing that Ring 10 delARM has the C-terminus cleaved by proteases during the purification process, we explored generating VLPs lacking C-terminal region to make a more uniform product. Without wishing to be bound by theory, it is contemplated that deleting this region for the AnelloVLP surface effector conjugation approach may eliminate immune responses to the C-terminal region (i.e. eliminate anti-drug responses). In addition, generating ORF1 VLPs in mammalian cells (e.g., 293 cells) further suggests these particles could be generated in other eukaryotic cell lines such as stable CHO cell lines to provide alternative production processes.

### Example 2. Conjugation of Peptides Via NHS Click Chemistry

[2340] Based on the structural analysis described herein, basic residues (lysine residues) of Ring 10 ORF1 were identified as surface exposed on the VLP viral surface. Several surface effectors can be conjugated to the amine groups of lysine by adding the click-chemistry entity NHS. In one example, the short antigenic region of the malaria CS protein (for example, the NANP repeat region known to be immunogenic in the R21 malaria vaccine currently being evaluated in the clinic) can be synthesized with an NHS moiety. By mixing the NANP-NHS peptide with ORF1 VLPs, we can conjugate the antigenic region of the R21 vaccine candidate to the ORF1 VLP generating a novel malaria particle as a vaccine candidate. Conjugation of other entities to the surface lysines though NHS conjugation could also be generated such as anti-sense oligomers (ASOs) or glycans from other bacteria known to provide an immune response in vaccines (such as, for example, the glycans of Prevnar13).

### Example 3. Conjugation of Polypeptides Via Two-Step Click Chemistry

[2341] As discussed in Example 2, surface exposed lysines are available for NHS conjugation. However, not every surface effector may be available for synthetic addition of NHS such as peptides, oligomers or glycans. In one example, larger surface effectors such as proteins (antibody fragments or larger vaccine antigens) could be generated with free cysteine, which can further be conjugated with click-chemistries, for example, by virtue of maleimide-click-chemistry linkers (maleimide being a click chemistry that binds thiols of free cysteine), which in turn can be added to paired chemistries on conjugated to free lysine on the VLP surface. In one example, a free cysteine could be engineered into a polypeptide encoding the C-terminal (immunogenic) portion of the malaria CS protein. This protein could then be conjugated by virtue of its free cysteine to a click chemistry moiety such as azide. The ORF1 VLP could be further conjugated by NHS-DBCO (DBCO being the click-chemistry partner of azide) by virtue of the surface lysines on ORF1. When the VLP-DBCO species is combined with the Azide-Malaria polypeptide species, the DBCO-Azide conjugation would produce a covalently attached Malaria-VLP particle suitable as a malaria vaccine candidate. This two-step conjugation approach could be suitable for other larger surface effectors where direct synthesis with click-chemistry moieties is not available, including antibodies and larger nucleic acid oligomers.

### Example 4. Conjugation of Polypeptides Via Maleimide Conjugation

[2342] In Examples 2 or 3 above, conjugation of surface effectors is done through conjugation of NHS moieties to surface lysines. This approach could have the added advantage of adding several surface effectors to the ORF1, depending on how many lysines are surface exposed in a given strain of ORF1. However, specific conjugation to ORF1 may be desired for some surface effectors to generate a more controlled product. In this example, a Ring 10 ORF1 structure (determined according to the structural analysis described herein) is used to define surface exposed regions of the VLP and introduce a free cysteine suitable for maleimide conjugation (maleimide being a click-chemistry that binds thiols in free cysteine residues), for example, at residues in the P2 domain of Ring10, such as Threonine 365. These engineered VLPs, perhaps in combination with deletion of the ARM as described in Example 1, would provide a cleaner, more controlled conjugation. By replacing the NHS species in Examples 2 and 3 with maleimide moieties, the conjugation of the surface effector, such as a maleimide malaria peptide, could be specifically targeted to a particular residue of interest, e.g., at a controlled stoichiometry.

[2343] To ensure only the desired target cysteines are available for modification with antigenic peptides or other surface effector molecules, the native cysteine residues of ORF1 (e.g., located at positions: 57, 64, 112, 131, 220, 223, 626) will also be replaced with either serine or alanine residues. When the residue to be mutated is on the surface of the molecule and the sidechain is exposed to solvent, replacing a cysteine with a serine is a conservative alteration as the two residues are isosteric and therefore should not disrupt the 3-dimensional structure of the protein. When the residue to be mutated is buried inside of the structure, alanine is a more conservative alteration as the polar side chain of serine is likely to destabilize the structure.

### Example 5. Genetic Grafting of Surface Effector to the VLP Surface

[2344] Using a structure determined for Ring 10, the region of the VLP that is surface exposed can be identified, for example, such as an HVR region. In this example, a VLP construct is generated in which a surface effector coding sequence replaces or is inserted into the HVR region of ORF. One example could be the genetic fusion of the malaria CS immunogenic portion into the HVR region of ORF1 VLPs (FIG. 2). In these genetic fusions, the VLP does not require conjugation, but rather a fusion protein comprises an ORF1 portion and a surface effector portion, such that the surface effector portion is displayed on the outer surface of the VLP. The advantage of this approach would be alleviating the need to conjugate the VLP post purification, which may not be an efficient process. Another advantage would be that each copy of the ORF1 molecule would be known to contain one copy of the surface effector. In some iterations it may be advantageous to express ORF1 with and without surface effectors generating mixed VLPs with fewer surface effectors.

[2345] Without wishing to be bound by theory, it is contemplated that the truncation of N- and C-termini will be beneficial for anelloVLP formation. Positive charged N-termini without nucleic acid appeared to improve the packaging of anelloVLP, as observed by electron microscopy in anelloviruses. Removal of the N-terminal peptide has been shown to boost anelloVLP titer and provide a more homogeneous morphology. On the other end, although the C-terminal domain does not have any charge tendency, the potential post-translational modification may hamper the maturation of anelloVLPs, as shown by electron microscopy. The removal of the C-terminal domain avoids such maturation process and thereby is expected to stabilize anelloVLP particle morphology. Based on these studies, we have engineered both N- and C-termini to carry different tags for purification, fluorescent tag labeling for biodistribution assay, or other epitopes as shown in Tables B2-4, B2-5, or B2-6. For example, we have inserted an AVI tag on the exterior P2 site for biotinylation or other epitope for vaccine development, e.g. malaria CS protein (see Table B2-4). Thus, a surface effector may be grafted onto the N- and/or C-terminus of an ORF 1 molecule.

[2346] In an example, a surface effector and ORF1 fusion protein comprises an amino acid sequence as listed in Table E1 below.

TABLE E1
Exemplary ORF1-surface effector fusion protein amino acid sequences

| Construct Name | Amino Acid Sequence |
|---|---|
| R21 construct | ANPNANPNANPNANPNANPNANPNANPNANPNANPNANPNANPNANPN |
| [184 C-Terminal residues of CS | ANPNANPNANPNKNNQGNGQGHNMPNDPNRNVDENANANSAVKNNNNE |
| protein (CS-Cterm) fused | EPSDKHIKEYLNKIQNSLSTEWSPCSVTCGNGIQVRIKPGSANKPKDE |
| to the Hepatitis B Virus Surface | LDYANDIEKKICKMEKCSSVFNVVNSSIGLIMVLSFLFLNENTTSGFL |
| Antigen (HBsAg)] | GPLLVLQAGFFLLTRILTIPQSLDSWWTSLNFQGGAPTCPGONSQSPT |
| | SNHSPTSCPPICPGYRWMCLRRFIIFLFILLLCLIFLLVLLDYQGMLP |
| | VCPLLPGTSTTGTGPCRTCTIPAQGTSMFPSCCCTKPSDGNCTCIPIP |
| | SSWAFARFLWEWASVRFSWLSLLVPFVQWFAGLSPTVWLSVIWMMWYR |
| | GPSLYNTLSPFLPLLPISFCLWVYI (SEQ ID NO: 2673) |
| R21 construct + C-Terminal | ANPNANPNANPNANPNANPNANPNANPNANPNANPNANPNANPN |
| Cysteine | ANPNANPNANPNANPNKNNQGNGQGHNMPNDPNRNVDENANANS |
| [184 C-Terminal residues of CS | AVKNNNNEEPSDKHIKEYLNKIQNSLSTEWSPCSVTCGNGIQVR |
| protein (CS-Cterm-184) fused | IKPGSANKPKDELDYANDIEKKICKMEKCSSVFNVVNSSIGLIM |
| to the Hepatitis B Virus Surface | VLSFLFLNENTTSGFLGPLLVLQAGFFLLTRILTIPOSLDSWWT |
| Antigen (HBsAg) | SLNFQGGAPTCPGQNSQSPTSNHSPTSCPPICPGYRWMCLRRFI |
| with a Cysteine residue for | IFLFILLLCLIFLLVLLDYQGMLPVCPLLPGTSTTGTGPCRTCT |
| conjugation] | IPAQGTSMFPSCCCTKPSDGNCTCIPIPSSWAFARFLWEWASVR |
| | FSWLSLLVPFVQWFAGLSPTVWLSVIWMMWYRGPSLYNTLSPFL |
| | PLLPISFCLWVYIC (SEQ ID NO: 2674) |
| SB-7062 R21 CS C-Terminus | MKIKTGARILALSALTTMMFSASALAANPNANPNANPNANPNAN |
| [184 C-Terminal residues of CS | PNANPNANPNANPNANPNANPNANPNANPNANPNANPNANPNKN |
| protein | NQGNGQGHNMPNDPNRNVDENANANSAVKNNNNEEPSDKHIKEY |
| for 293 expression] | LNKIQNSLSTEWSPCSVICGNGIQVRIKPGSANKPKDELDYAND |
| | IEKKICKMEKCSSVFNVVNSSIGLIMVLSFLFLNPHHHHHHA |
| | (SEQ ID NO: 2675) |
| SB-7062 R21 CS C-Terminus + | MKIKTGARILALSALTTMMFSASALAANPNANPNANPNANPNAN |
| C-Terminal Cysteine | PNANPNANPNANPNANPNANPNANPNANPNANPNANPNANPNKN |
| [184 C-Terminal residues of CS | NQGNGQGHNMPNDPNRNVDENANANSAVKNNNNEEPSDKHIKEY |
| protein | LNKIQNSLSTEWSPCSVTCGNGIQVRIKPGSANKPKDELDYAND |
| with additional C-Terminal | IEKKICKMEKCSSVFNVVNSSIGLIMVLSFLFLNPHHHHHHAC |
| Cysteine for conjugation] | (SEQ ID NO: 2676) |
| R21 Peptide NANP₍₆ₓ₎ | NPNANPNANPNANPNANPNANPNA(K/Mal)-amide (SEQ |
| [Peptide of N-Terminal | ID NO: 2677) |
| residues of R21 6x(NANP) | |
| with NHS for conjugation] | |
| R21 Peptide NANP-2 | ANPNKNNQGNGQGHNMPNDPNRNVDENANANSAVKNNNNE(K/Mal- |
| [Peptide of second segment of | amide (SEQ ID NO: 2678) |
| R21 with NHS for conjugation] | |
| R21 Peptide Solved Structure | EPSDKHIKEYLNKIONSLSTEWSPSSVTSGNGIQVRIKPGSANK |
| [Structured portion of C- | PKDELDYANDIEKKISKMEKSS(K/Mal)-amide (SEQ ID |
| Terminal segment of R21] | NO: 2679) |
| Ring 10 (Ly1) Wt protein | MPWWYRRRSYNPWRRRNWFRRPRKTIYRRYRRRRRWVRRKPFYK |
| sequence | RKIKRLNIVEWQPKSIRKCRIKGMLCLFQTTEDRLSYNFDMYEE |
| | SIIPEKLPGGGGFSIKNISLYALYQEHIHAHNIFTHTNTDRPLA |
| | RYTGCSLKFYQSKDIDYVVTYSTSLPLRSSMGMYNSMQPSIHLM |
| | QQNKLIVPSKQTQKRRKPYIKKHISPPTQMKSQWYFQHNIANIP |
| | LLMIRTTALTLDNYYIGSRQLSTNVTIHTLNITYIQNRDWGDRN |
| | KTYYCQTLGTQRYFLYGTHSTAQNINDIKLQELIPLINTQDYVQ |
| | GFDWTEKDKHNITTYKEFLTKGAGNPFHAEWITAQNPVIHTANS |
| | PTQIEQIYTASTTTFQNKKLTDLPTPGYIFITPTVSLRYNPYKD |
| | LAERNKCYFVRSKINAHGWDPEQHQELINSDLPQWLLLFGYPDY |
| | IKRTQNFALVDTNYILVDHCPYTNPEKTPFIPLSTSFIEGRSPY |
| | SPSDTHEPDEEDQNRWYPCYQYQQESINSICLSGPGTPKIPKGI |
| | TAEAKVKYSFNFKWGGDLPPMSTITNPTDQPTYVVPNNFNETTS |
| | LONPTTRPEHFLYSFDERRGQLTEKATKRLLKDWETKETSLLST |
| | EYRFAEPTQTQAPQEDPSSEEEEESNLFERLLRORTKOLQLKRR |
| | IIQTLKDLQKLE (SEQ ID NO: 2680) |
| CCN5 CTermCys | MRGTPKTHLLAFSLLCLLSKVRTQLCPTPCTCPWPPPRCPLGVP |
| | LVLDGCGCCRVCARRLGEPCDQLHVCDASQGLVCQPGAGPGGRG |
| | ALCLLAEDDSSCEVNGRLYREGETFQPHCSIRCRCEDGGFTCVP |
| | LCSEDVRLPSWDCPHPRRVEVLGKCCPEWVCGQGGGLGTQPLPA |
| | QGPQFSGLVSSLPPGVPCPEWSTAWGPCSTTCGLGMATRVSNON |
| | RFCRLETQRRLCLSRPCPPSRGRSPONSAFGGGGSGGGGSGGGG |
| | SC (SEQ ID NO: 2681) |
| Aflibercept malE_CTermCys | MKIKTGARILALSALTTMMFSASALASDTGRPFVEMYSEIPEII |
| | HMTEGRELVIPCRVTSPNITVTLKKFPLDTLIPDGKRIIWDSRK |
| | GFIISNATYKEIGLLTCEATVNGHLYKTNYLTHRQTNTIIDVVL |
| | SPSHGIELSVGEKLVLNCTARTELNVGIDENWEYPSSKHQHKKL |
| | VNRDLKTQSGSEMKKFLSTLTIDGVTRSDQGLYTCAASSGLMTK |
| | KNSTFVRVHEKDKTHTCPPCPAPELLGGPSVFLFPPKPKDTLMI |
| | SRTPEVTCVVVDVSHEDPEVKFNWYVDGVEVHNAKTKPREEQYN |
| | STYRVVSVLIVLHQDWLNGKEYKCKVSNKALPAPIEKTISKAKG |
| | QPREPQVYTLPPSRDELTKNQVSLTCLVKGFYPSDIAVEWESNG |
| | QPENNYKTTPPVLDSDGSFFLYSKLTVDKSRWQQGNVFSCSVMH |
| | EALHNHYTQKSLSLSPGGGGSGGGGSGGGGSGGGGSC (SEQ ID |
| | NO: 2682) |
| Aflib_D1-D2 malE_CTermCys | MKIKTGARILALSALTTMMFSASALASDTGRPFVEMYSEIPEII |
| | HMTEGRELVIPCRVISPNITVTLKKFPLDTLIPDGKRIIWDSRK |
| | GFIISNATYKEIGLLTCEATVNGHLYKTNYLTHRQTNTIIDVVL |
| | SPSHGIELSVGEKLVLNCTARTELNVGIDENWEYPSSKHQHKKL |
| | VNRDLKTQSGSEMKKFLSTLTIDGVTRSDQGLYTCAASSGLMTK |
| | KNSTFVRVHEKGGGGSGGGGSGGGGSC (SEQ ID NO: 2683) |
| Ranibizumab HC | MKIKTGARILALSALTTMMFSASALAEVQLVESGGGLVQPGGSL |
| malE_CTermCys | RLSCAASGYDFTHYGMNWVRQAPGKGLEWVGWINTYTGEPTYAA |
| | DFKRRFTFSLDISKSTAYLQMNSLRAEDTAVYYCAKYPYYYGTS |
| | HWYFDVWGQGTLVTVSSASTKGPSVFPLAPSSKSTSGGTAALGC |
| | LVKDYFPEPVTVSWNSGALTSGVHTFPAVLQSSGLYSLSSVVTV |
| | PSSSLGTQTYICNVNHKPSNTKVDKKVEPKSCDKTHLGGGGSGG |
| | GGSGGGGSC (SEQ ID NO: 2684) |
| Bevacizumab HC | MKIKTGARILALSALTTMMFSASALAEVQLVESGGGLVQPGGSL |
| malE_CTermCys | RLSCAASGYTFTNYGMNWVRQAPGKGLEWVGWINTYTGEPTYAA |
| | DFKRRFTFSLDTSKSTAYLOMNSLRAEDTAVYYCAKYPHYYGSS |
| | HWYFDVWGQGTLVTVSSASTKGPSVFPLAPSSKSTSGGTAALGC |
| | LVKDYFPEPVTVSWNSGALTSGVHTFPAVLQSSGLYSLSSVVTV |
| | PSSSLGTQTYICNVNHKPSNTKVDKKVEPKSCDKTHTCPPCPAP |
| | ELLGGPSVFLFPPKPKDTLMISRTPEVTCVVVDVSHEDPEVKFN |
| | WYVDGVEVHNAKTKPREEQYNSTYRVVSVLIVLHQDWLNGKEYK |
| | CKVSNKALPAPIEKTISKAKGQPREPQVYTLPPSREEMTKNQVS |
| | LTCLVKGFYPSDIAVEWESNGQPENNYKTTPPVLDSDGSFFLYS |
| | KLTVDKSRWQQGNVFSCSVMHEALHNHYTQKSLSLSPGKKDELG |
| | GGGSGGGGSGGGGSC (SEQ ID NO: 2685) |
| scFab RaniHC-link50-LC | MKIKTGARILALSALTTMMFSASALAEVQLVESGGGLVQPGGSL |
| malE_CTermCys | RLSCAASGYDFTHYGMNWVRQAPGKGLEWVGWINTYTGEPTYAA |
| | DFKRRFTFSLDTSKSTAYLQMNSLRAEDTAVYYCAKYPYYYGTS |
| | HWYFDVWGQGTLVTVSSASTKGPSVFPLAPSSKSTSGGTAALGC |
| | LVKDYFPEPVTVSWNSGALTSGVHTFPAVLQSSGLYSLSSVVTV |
| | PSSSLGTQTYICNVNHKPSNTKVDKKVEPKSCDKTHLGGSSGSG |
| | SGSTGTSSSGTGTSAGTTGTSASTSGSGSGGGGGSGGGGSAGGD |
| | IQLTQSPSSLSASVGDRVTITCSASQDISNYLNWYQQKPGKAPK |
| | VLIYFTSSLHSGVPSRFSGSGSGTDFTLTISSLQPEDFATYYCQ |
| | QYSTVPWTFGQGTKVEIKRTVAAPSVFIFPPSDEQLKSGTASVV |
| | CLLNNFYPREAKVQWKVDNALQSGNSQESVTEQDSKDSTYSLSS |
| | TLTLSKADYEKHKVYACEVTHQGLSSPVTKSFNRGECGGGGSGG |
| | GGSGGGGSC (SEQ ID NO: 2686) |

### Example 6. Generation of Circular ssDNA Transgene for In Vitro Assembly of Anellovectors

[2347] Anelloviruses encapsidate circularized negative sense (ns) single stranded (ss) DNA genomes. Described in this example is a method for generating circularized ns-ssDNA purified in vitro. First, the genome of an Anellovirus (e.g., the genome of strain Ring 2 as described herein) was generated in a plasmid for amplification. Next, the DNA encoding the viral genome was cut from the plasmid and re-ligated to form double-stranded in vitro circularized (IVC) DNA. The IVC DNA was denatured with heat by boiling at 80° C. for 5 minutes in the presence of urea and run on a denaturing gel overnight at 4° C. When the gel is stained with fluorescently-labeled primers from either the positive strand (to bind the negative-sense sequence) or the negative strand (to bind the positive-sense sequence) it was observed that the IVC DNA was separated into positive and negative sense circularized ssDNA (FIG. 3).

[2348] The ssDNA can be extracted from the gel using conventional DNA purification kits and used in anellovector in vitro encapsidation screening. Plasmids can also be cloned that encode viral genomes that also harbor reporter genes or therapeutic genes, for example, such that generation and encapsidation of the resulting circularized ssDNA would generate an anellovector that can transduce cells with the reporter or therapeutic gene.

### Example 7. Anellovector ORF1 VLP Expression in Insect or Mammalian Cells and Purification

[2349] Described in this example are expression and purification protocols for Anellovirus ORF1 recombinant proteins and variations that can be used, for example, in generating anellovector strains in vitro. Several Anellovirus ORF1 strains have been successfully expressed in insect (Sf9) and/or mammalian (293) cell lines (FIG. 4A). As described in Examples 8 and 9 below, several ORF1 proteins from different Anellovirus strains (as well as the related CAV Vpl capsid protein) were shown to have a propensity to self-assemble into VLPs in vitro when observed by electron microscopy (FIG. 4B).

[2350] In one example, anellovectors can be produced in vitro by generating expression constructs for certain Anellovirus proteins (e.g., as described herein), such as an Anellovirus ORF1. Such expression constructs can be introduced into cells (e.g., mammalian cells or insect cells, e.g. Sf9 cells) to produce Anellovirus ORF1 proteins capable of forming capsids. Production of the ORF1 proteins can be done in the presence or absence of a suitable Anellovirus ORF2 protein. The expression constructs can also be engineered to attach (e.g., fuse) an affinity tag to the Anellovirus ORF1 protein. The ORF1 proteins can then be purified from the cells.

[2351] In some examples, a desired payload nucleic acid molecule (e.g., an engineered Anellovirus genome, a wild-type Anellovirus genome, an oligonucleotide, a single-stranded DNA, a double-stranded DNA, or an RNA, e.g., an mRNA) can be encapsulated by the ORF1 proteins in vitro, under conditions suitable for assembly of the ORF1 proteins into a proteinaceous exterior (e.g., a capsid). Such conditions may include, for example, a solution comprising one or more of: detergents, buffers, and/or reducing agents (e.g., as described herein), as well as incubation at a preselected temperature for a preselected time. This assembly can result in formation of particles (e.g., comprising assembled ORF1 proteins encapsulating the desired payload nucleic acid molecule). Particle formation can be assessed, for example, by co-migration of ssDNA in size exclusion chromatography and/or by detecting DNase-resistant payload nucleic acid molecules (e.g., by PCR), e.g., as described herein. In addition, particles can be assessed for their capacity to transduce target cells with the payload nucleic acid molecule (e.g., by detecting a gene product encoded by the payload nucleic acid molecule, e.g., a reporter).

[2352] In addition to exploring the purification and in vitro assembly of ORF1 from different strains, Anellovirus ORF1 fragments or chimeric molecules can be used to improve the efficiency of in vitro assembly. Such fragment or chimeric molecules include, but are not limited to, Anellovirus ORF1 proteins that harbor mutations introduced into the N-terminal Arginine-rich region (also referred to as the ARG arm) to alter the pI of the ARG arm, permitting pH sensitive nucleic acid binding to trigger particle assembly (SEQ ID NOs: 563-565). Anellovirus ORF1 mutations that improve stability include, for example, mutations to the interprotomer contacting beta strands F and G of the canonical structural jellyroll beta-barrel (F and G beta strands) to alter the hydrophobic state of the protomer surface to make capsid formation more thermodynamically favored.

[2353] Exemplary chimeric ORF1 proteins include, but are not limited to, Anellovirus ORF1 proteins which have a portion or portions of their sequence replaced with comparable portions from another capsid protein, such as BFDV, CAV capsid protein or Hepatitis E (such as the ARG arm or F and G beta strands of Ring 9 ORF1 replaced with the comparable components from BFDV capsid protein; SEQ ID NOs: 566-567). Chimeric ORF1 proteins may also include ORF1 proteins which have a portion or portions of their sequence replaced with comparable portions of another Anellovirus ORF1 protein (such as structural jellyroll fragments or the C-terminal portion of Ring 2 ORF1 replaced with comparable portions of Ring 9 ORF1; SEQ ID NOs: 568-575).

[2354] Proteins will be purified using purification techniques, including but not limited to chelating purification, heparin purification, gradient sedimentation purification and/or SEC purification.

### Example 8. Expression of Ring2 and Ring10 Anellovirus ORF1s in Insect Cells

[2355] In this example, DNA sequences encoding Ring 2 ORF1 or Ring 10 ORF1, each fused to an N-terminal HIS₆-tag (SEQ ID NO: 2743) (HIS-ORF1), was codon optimized for insect expression and cloned into the baculovirus expression vector pFASTbac system according to the manufacture's method (ThermoFisher Scientific). Insect cells (Sf9 cells) were infected with Ring HIS-ORF1 baculovirus and the cells were harvested 3-days post-infection by centrifugation. The cells were lysed and the protein was purified using a chelating resin affinity column (HisTrap, GE Healthcare). The resulting material was purified again using a heparin affinity column (Heparin HiTrap, GE Healthcare) and fractions containing ORF1 were analyzed by negative staining electron microscopy. Both Ring 2 ORF1 and Ring 10 ORF1 exhibited an observed propensity to form ˜35 nm virus-like particles (VLPs) in this in vitro setting (FIG. 4B).

### Example 9. Expression of CAV Capsid Protein VP1 in Mammalian Cells

[2356] In this example, DNA sequences encoding CAV capsid protein (CAV Vpl), fused to an N-terminal HIS₆—Flag-tag (“HHHHHH” disclosed as SEQ ID NO: 2743) (HIS-Flag-Vp1), and helper protein (Vp2) were codon optimized for mammalian expression and cloned into a mammalian expression vector including a CMV promoter. Mammalian cells (293expi cells) were transfected with CAV Vp1 and Vp2 expression vectors. The cells were harvested 3-days post-infection by centrifugation. The cells were lysed and the lysis was purified using chelation and heparin purification as described in Example 8. The elution fraction containing CAV Vp1 were analyzed by negative staining electron microscopy. As shown in FIG. 4B, CAV Vp1 virus-like particles were observed in this in vitro setting.

### Example 10. Expression of Ring2 ORF1 and ORF2 in Insect Cells

[2357] In this example, untagged Ring 2 ORF1 and ORF2 (a putative zinc-finger Ring 2 protein of unknown function) were cloned into a dual-expression baculovirus and co-expressed in Sf9 insect cells using a baculovirus system as described herein. Frozen pellet from a 1 L preparation of the Sf9 cells were resuspended in 60 mL cytosolic buffer (50 mM Tris pH 8, 50 mM NaCl, 1× protease inhibiter), vortexed, pipetted up-down and distributed into two 30 mL aliquotes in 50 mL conical tubes. The solutions were spun down for 20 min at 14,000 rpm using a fixed rotor centrifuge. The supernatant was collected into separate 50 mL conical tubes (“wash sup”). Each pellet was resuspended with 30 mL lysis buffer (50 mM Tris pH 8, 50 mM NaCl buffer, 1× protease inhibitor, 0.01-0.1% Triton), vortexed, and sonicated with four cycles. 1× benzonase was added and the solutions were spun for 20 min at 14,000 rpm using a fixed rotor centrifuge. The lysate was incubated for about 30 minutes to allow the benzonase to react to remove host cell DNA. The ORF1 was purified from the lysates using an affinity purification step (heparin column pH=8 with a high salt gradient elution) and VLPs, partially formed VLPs, and ORF1 proteins (putative capsomers) were separated using size-exclusion purification (SEC; GE Healthcare Sephacryl S-500 column). The resulting material was analyzed by electron microscopy (FIG. 5A-5C). Approximately 10¹¹ total VLP particles at approximately 109-10¹⁰ particles/ml concentration were purified, as determined by western blot analysis and electron microscopy. Such a high-titer VLP preparation can be used to define in vitro disassembly and re-assembly/encapsidation conditions for anellovector generation as described below.

### Example 11. Disassembly of Ring2 VLPs Using Urea

[2358] In this example, purified Ring2 VLPs were dissociated using a chaotropic agent. Briefly, purified Ring 2 VLPs were treated with urea at different concentrations, between 1 to 6 molar (M), to identify conditions sufficient to disassemble the particles. In one example, Ring 2 VLPs were treated with urea with a final concentration of 2M for approximately 10 minutes. The sample was observed by electron microscopy before (FIG. 6A) and after (FIG. 6B) urea treatment. Prior to treatment with urea, VLPs were observed with an estimated particle titer of 1×10⁹ to 1×10¹⁰ particles/ml. After treatment with urea, the VLPs were no longer observed. A new species, which appear to be hollow circles, like capsomers, was also observed (FIG. 6C).

[2359] In a further example, Ring 2 VLPs are dissociated with 2M urea, and the urea is dialyzed away in the absence or presence of mRNA encoding the mCherry reporter gene. In this example, mRNA is introduced at a molar concentration estimated to be approximately 5-times greater than the estimated number of VLPs prior to dissociation. The dissociated ORF1 and mRNA solution are incubated for approximately 30 minutes to allow complex formation before reassembly by dialysis. After the incubation period, disassembled ORF1 (i.e. VLPs treated with 2M urea) with or without mRNA are then dialyzed against 50 mM Tris pH 8.0 with 150 mM NaCl and 0.01% poloxamer to permit VLP reassembly. The initial VLPs, dissociated ORF1, reassembled ORF1 in the absence of nucleic acids, and reassembled ORF1 in the presence of nucleic acids are then screened by EM to confirm that the dissociation/re-assembly processes are successful as well as to estimate the amount of VLP recovered. It is contemplated that no VLPs will be observed for disassembled VLP or disassembled VLP dialyzed in the absence of mRNA. However, it is contemplated that VLPs prior to disassembly may be present at a particle titer of 1×10⁹ to 1×10¹⁰ particles/ml and the VLP formation observed after dialysis in the presence of mRNA may have a particle titer of 1×10⁷ to 1×10⁸ particles/ml. It is contemplated that VLP reassembly occurs when disassembled ORF1 is dialyzed/reassembled in the presence of mRNA, resulting in mRNA-encapsidated anellovectors.

### Example 12. Dissociation of Anellovirus VLPs and Reassembly Around Nucleic Acid Cargoes

[2360] In this example, Anellovirus ORF1 proteins produced and purified as described herein (e.g., wildtype ORF1 protein, chimeric ORF1 protein, or fragments thereof) will be disassembled and then reassembled in vitro. VLPs will be incubated under conditions sufficient to dissociate VLPs or viral capsids (e.g., as described herein), and then under conditions suitable enable reassembly, for example, around nucleic acid cargo (FIGS. 5A-5C). Exemplary nucleic acid cargo can include, without limitation, as double stranded DNA, single stranded DNA (ssDNA), or RNA that encodes a gene of interest to be delivered as a therapeutic agent. Exemplary conditions sufficient to dissociate VLPs or viral capsids include, but are not limited to, buffers of different pH, conditions of defined conductivity (salt content), conditions containing detergents (such as SDS, Tween, Triton), conditions containing chaotropic agents (such as Urea, e.g., as described herein) or conditions involving defined temperature and time (reannealing temperatures). Generally, nucleic acid cargo of defined concentration will be combined with Anellovirus ORF1 proteins of defined concentration and treated with conditions sufficient to permit nucleic acid encapsidation. The resulting particles can be subsequently purified using viral purification procedures in the art and/or as described herein.

Encapsidation of ssDNA Cargo

[2361] In this example, purified Anellovirus ORF1 proteins are treated with high salt in 2 M Urea to disassemble VLPs into dispersed protein or capsomers. The Anellovirus ORF1 proteins are then mixed with ssDNA and dialyzed against Tris pH 8.0 with 150 mM NaCl to permit VLP formation and ssDNA encapsidation. The subsequent complex is purified by SEC using to isolate anellovectors encapsidating ssDNA from non-encapsidated DNA. Anellovector assembly can be further evaluated by biophysical assessment such as DLS or electron microscopy, e.g., as described herein.

Encapsidation of mRNA Cargo with Wild-Type Anellovirus ORFJ

[2362] In this example, purified Anellovirus ORF1 proteins are treated with 1 M NaCl with 0.1% SDS dissociate oligomers or VLPs into dispersed protein or capsomers. The Anellovirus ORF1 proteins are then mixed with mRNA, such as an mRNA that encodes a gene of interest (e.g., GFP, mCherry, or EPO), and dialyzed against Tris pH 8.0 with 150 mM NaCl to permit VLP formation. The subsequent complex is purified by SEC using Tris pH 8.0 buffer to isolate anellovectors encapsidating mRNA. Anellovector assembly can be further evaluated by in vitro or in vivo readout, for example, by transducing cells and observing the expression of a reporter gene (in the case of mCherry or GFP) or through expression of a gene of interest (such as using an ELISA to detect the expression of a gene such as EPO).

Encapsidation of mRNA Cargo with Modified ORF1 Having mRNA Binding Region

[2363] In this example, packaging of mRNA cargo by Anellovirus ORF1 proteins is improved by modifying the Anellovirus ORF1 protein to harbor contact residues known to bind mRNA. For example, the ssDNA contact residues and/or the structural jellyroll beta strands known to contact ssDNA and/or the N-terminal arginine ARM can be replaced with components of an mRNA binding viral protein (e.g., MS2 coat protein) or other mRNA-binding protein to permit efficient binding and packaging of mRNA. This mRNA-binding chimeric ORF1 could be then treated with 1 M NaCl with 0.1% SDS dissociate oligomers or VLPs into dispersed protein or capsomers. The chimeric ORF1 would then be mixed with mRNA, such as an mRNA that translate a gene of interest such as GFP, mCherry or EPO, and dialyzed against Tris pH 8.0 with 150 mM NaCl to permit VLP formation. The subsequent complex is purified by SEC using Tris pH 8.0 buffer to isolate anellovectors encapsidating mRNA. Anellovector assembly can be further evaluated by in vitro or in vivo readout, for example, by transducing cells and observing the expression of the reporter gene (in the case of mCherry or GFP) or through expression of a gene of interest (such as using an ELISA to detect the expression of a gene such as EPO).

Encapsidation of ssDNA-mRNA Hybrid Cargo with ORF1

[2364] In this example, packaging of mRNA cargo by Anellovirus ORF1 proteins is improved by binding the mRNA molecule to ssDNA or modifying the mRNA transgene in such a way that that a section of the backbone would permit binding to the ssDNA contact residues of wildtype Anellovirus ORF1. For example, modified ssDNA that can bind Anellovirus ORF1 by virtue of its sugar-chain backbone but pair with mRNA non-covalently is mixed with the mRNA to produce a synthetic mRNA complex. Alternatively, a synthetic mRNA transgene can be synthesized with a section or sections of the mRNA molecule harboring a DNA backbone permitting binding and encapsidation with Anellovirus ORF1, while retaining the portion of the mRNA that encodes the gene to be delivered. Anellovirus ORF1 could be then treated with 1 M NaCl with 0.1% SDS dissociate oligomers or VLPs into dispersed protein or capsomers. The Anellovirus ORF1 would then be mixed with the synthetic mRNA (complexes or molecules), such as an mRNA that translate a gene of interest such as GFP, mCherry or EPO, and dialyzed against Tris pH 8.0 with 150 mM NaCl to permit VLP formation. The subsequent particle is purified by SEC using Tris pH 8.0 buffer to isolate anellovectors encapsidating mRNA. Anellovector assembly can be further evaluated by in vitro or in vivo readout by transducing cells and observing the expression of the reporter gene (in the case of mCherry or GFP) or through expression of a gene of interest (such as using an ELISA to detect the expression of a gene such as EPO).

### Example 13: Replication-Deficient Anellovectors and Helper Viruses

[2365] For replication and packaging of an anellovector, some elements (e.g., an ORF1, ORF1/1, ORF1/2, ORF2, ORF2/2, ORF2/3, and/or ORF2t/3 molecule, or a nucleic acid sequence encoding same) can be provided in trans. These include proteins or non-coding RNAs that direct or support DNA replication or packaging. Trans elements can, in some instances, be provided from a source alternative to the anellovector, such as a helper virus, plasmid, or from the cellular genome.

[2366] Other elements are typically provided in cis (e.g., a TATA box, cap site, initiator element, transcriptional start site, 5′ UTR conserved domain, three open-reading frame region, poly(A) signal, or GC-rich region). These elements can be, for example, sequences or structures in the anellovector DNA that act as origins of replication (e.g., to allow amplification of anellovector DNA) or packaging signals (e.g., to bind to proteins to load the genome into the capsid). Generally, a replication deficient virus or anellovector will be missing one or more of these elements, such that the DNA is unable to be packaged into an infectious virion or anellovector even if other elements are provided in trans.

[2367] Replication deficient viruses can be useful for controlling replication of an anellovector (e.g., a replication-deficient or packaging-deficient anellovector) in the same cell. In some instances, the virus will lack cis replication or packaging elements, but express trans elements such as proteins and non-coding RNAs. Generally, the therapeutic anellovector would lack some or all of these trans elements and would therefore be unable to replicate on its own, but would retain the cis elements. When co-transfected/infected into cells, the replication-deficient virus would drive the amplification and packaging of the anellovector. The packaged particles collected would thus be comprised solely of therapeutic anellovector, without contamination from the replication-deficient virus.

[2368] To develop a replication deficient anellovector, conserved elements in the non-coding regions of Anellovirus will be removed. In particular, deletions of the conserved 5′ UTR domain and the GC-rich domain will be tested, both separately and together. Both elements are contemplated to be important for viral replication or packaging. Additionally, deletion series will be performed across the entire non-coding region to identify previously unknown regions of interest.

[2369] Successful deletion of a replication element will result in reduction of anellovector DNA amplification within the cell, e.g., as measured by qPCR, but will support some infectious anellovector production, e.g., as monitored by assays on infected cells that can include any or all of qPCR, western blots, fluorescence assays, or luminescence assays. Successful deletion of a packaging element will not disrupt anellovector DNA amplification, so an increase in anellovector DNA will be observed in transfected cells by qPCR. However, the anellovector genomes will not be encapsulated, so no infectious anellovector production will be observed.

### Example 14: Manufacturing Process for Replication-Competent Anellovectors

[2370] This example describes a method for recovery and scaling up of production of replication-competent anellovectors. Anellovectors are replication competent when they encode in their genome all the required nucleic acid elements and ORFs necessary to replicate in cells. Since these anellovectors are not defective in their replication they do not need a complementing activity provided in trans. They might, however need helper activity, such as enhancers of transcriptions (e.g. sodium butyrate) or viral transcription factors (e.g. adenoviral E1, E2 E4, VA; HSV Vp16 and immediate early proteins).

[2371] In this example, double-stranded DNA encoding the full sequence of a synthetic anellovector either in its linear or circular form is introduced into 5 E+05 adherent mammalian cells in a T75 flask by chemical transfection or into 5 E+05 cells in suspension by electroporation. After an optimal period of time (e.g., 3-7 days post transfection), cells and supernatant are collected by scraping cells into the supernatant medium. A mild detergent, such as a biliary salt, is added to a final concentration of 0.5% and incubated at 37° C. for 30 minutes. Calcium and Magnesium Chloride is added to a final concentration of 0.5 mM and 2.5 mM, respectively. Endonuclease (e.g. DNAse I, Benzonase), is added and incubated at 25-37° C. for 0.5-4 hours. Anellovector suspension is centrifuged at 1000×g for 10 minutes at 4° C. The clarified supernatant is transferred to a new tube and diluted 1:1 with a cryoprotectant buffer (also known as stabilization buffer) and stored at −80° C. if desired. This produces passage 0 of the anellovector (P0). To bring the concentration of detergent below the safe limit to be used on cultured cells, this inoculum is diluted at least 100-fold or more in serum-free media (SFM) depending on the anellovector titer.

[2372] A fresh monolayer of mammalian cells in a T225 flask is overlaid with the minimum volume sufficient to cover the culture surface and incubated for 90 minutes at 37° C. and 5% carbon dioxide with gentle rocking. The mammalian cells used for this step may or may not be the same type of cells as used for the P0 recovery. After this incubation, the inoculum is replaced with 40 ml of serum-free, animal origin-free culture medium. Cells are incubated at 37° C. and 5% carbon dioxide for 3-7 days. 4 ml of a 10× solution of the same mild detergent previously utilized is added to achieve a final detergent concentration of 0.5%, and the mixture is then incubated at 37° C. for 30 minutes with gentle agitation. Endonuclease is added and incubated at 25-37° C. for 0.5-4 hours. The medium is then collected and centrifuged at 1000×g at 4° C. for 10 minutes. The clarified supernatant is mixed with 40 ml of stabilization buffer and stored at −80° C. This generates a seed stock, or passage 1 of anellovector (P1).

[2373] Depending on the titer of the stock, it is diluted no less than 100-fold in SFM and added to cells grown on multilayer flasks of the required size. Multiplicity of infection (MOI) and time of incubation is optimized at smaller scale to ensure maximal anellovector production. After harvest, anellovectors may then be purified and concentrated as needed. A schematic showing a workflow, e.g., as described in this example, is provided in FIG. 8.

### Example 15: Manufacturing Process of Replication-Deficient Anellovectors

[2374] This example describes a method for recovery and scaling up of production of replication-deficient anellovectors.

[2375] Anellovectors can be rendered replication-deficient by deletion of one or more ORFs (e.g., ORF1, ORF1/1, ORF1/2, ORF2, ORF2/2, ORF2/3, and/or ORF2t/3) involved in replication. Replication-deficient anellovectors can be grown in a complementing cell line. Such cell line constitutively expresses components that promote anellovector growth but that are missing or nonfunctional in the genome of the anellovector.

[2376] In one example, the sequence(s) of any ORF(s) involved in anellovector propagation are cloned into a lentiviral expression system suitable for the generation of stable cell lines that encode a selection marker, and lentiviral vector is generated as described herein. A mammalian cell line capable of supporting anellovector propagation is infected with this lentiviral vector and subjected to selective pressure by the selection marker (e.g., puromycin or any other antibiotic) to select for cell populations that have stably integrated the cloned ORFs. Once this cell line is characterized and certified to complement the defect in the engineered anellovector, and hence to support growth and propagation of such anellovectors, it is expanded and banked in cryogenic storage. During expansion and maintenance of these cells, the selection antibiotic is added to the culture medium to maintain the selective pressure. Once anellovectors are introduced into these cells, the selection antibiotic may be withheld.

[2377] Once this cell line is established, growth and production of replication-deficient anellovectors is carried out, e.g., as described herein.

### Example 16: Production of Anellovectors Using Suspension Cells

[2378] This example describes the production of anellovectors in cells in suspension.

[2379] In this example, an A549 or 293T producer cell line that is adapted to grow in suspension conditions is grown in animal component-free and antibiotic-free suspension medium (Thermo Fisher Scientific) in WAVE bioreactor bags at 37 degrees and 5% carbon dioxide. These cells, seeded at 1×10⁶ viable cells/mL, are transfected using lipofectamine 2000 (Thermo Fisher Scientific) under current good manufacturing practices (cGMP), with a plasmid comprising anellovector sequences, along with any complementing plasmids suitable or required to package the anellovector (e.g., in the case of a replication-deficient anellovector, e.g., as described herein). The complementing plasmids can, in some instances, encode for viral proteins that have been deleted from the anellovector genome (e.g., an anellovector genome based on a viral genoe, e.g., an Anellovirus genome, e.g., as described herein) but are useful or required for replication and packaging of the anellovectors. Transfected cells are grown in the WAVE bioreactor bags and the supernatant is harvested at the following time points: 48, 72, and 96 hours post transfection. The supernatant is separated from the cell pellets for each sample using centrifugation. The packaged anellovector particles are then purified from the harvested supernatant and the lysed cell pellets using ion exchange chromatography.

[2380] The genome equivalents in the purified prep of the anellovectors can be determined, for example, by using a small aliquot of the purified prep to harvest the anellovector genome using a viral genome extraction kit (Qiagen), followed by qPCR using primers and probes targeted towards the anellovector DNA sequence.

[2381] The infectivity of the anellovectors in the purified prep can be quantified by making serial dilutions of the purified prep to infect new A549 cells. These cells are harvested 72 hours post transfection, followed by a qPCR assay on the genomic DNA using primers and probes that are specific to the anellovector DNA sequence.

### Example 17: Antibody Generation and Western Blot Analysis

[2382] This example describes generation of Ring 10 (also referred to herein as Ly1) antibodies and western blot analysis for determining expression, e.g., of Ring 10 ORF1 proteins. Ring 10 antibodies were generated by immunizing rabbits with a synthetic peptide representing one of three portions of the ORF1 protein (jelly roll residues 46-58: KIKRLNIVEWQPK (SEQ ID NO: 2687), spike domain residues 485-502: SPSDTHEPDEEDQNRWYP (SEQ ID NO: 2688), C-terminal domain residues 635-672: SEEEEESNLFERLLRQRTKQLQLKRRIIQTLKDLQKLE (SEQ ID NO: 2689)) conjugated to a carrier protein by an engineered N-terminal cysteine. Rabbits were immunized twice, and polyclonal antibodies were purified from bleeds using protein A purification (Custom Antibody Production, Life Technologies corporation). Western blot analysis was performed using NUPAGE 4-12% gels (ThermoFisher) transferred to nitrocellulose membranes using the Transblot Turbo system (BioRad). Membranes were blocked with blocking buffer (Licor), probed ˜16 hours with primary antibody, and detected using anti-rabbit IRDye infrared secondary antibodies and imaging system (Licor).

### Example 18: Construct Design, Cell Culture and Protein Expression/Purification

[2383] This example describes design of Ring 10 constructs, cell culture, and expression/purification of Ring 10 proteins. The Ring 10 ORF2 and ORF1 sequences were codon optimized for insect cells and with different ORF1 construct length variations (full-length ORF1, delARM with a deletion of residue 2-45, and delARM/delCTD with deletions of residues 2-45 and 552-672). The ORF2 and ORF1 constructs were cloned into the pFastBac Dual plasmid which was used to generate baculoviruses. To express the ORF1 proteins, Sf9 cells (Gibco™ 11496015) were infected by baculovirus with multiplicity of infection=1 and the cells were cultured for three days at 27° C. and harvested by centrifugation. The cells were lysed by treatment with 0.01% Triton X-100 (Sigma-Aldrich 11332481001), subjected to micro-fluidization, and treated with protease inhibitors (Thermo Scientific Halt Protease Inhibitor Cocktail, PI78438) and DNase (Benzonase®; Sigma). Cell lysate was subsequently purified using HiTrap Heparin affinity chromatography (Cytiva) followed by size-exclusion chromatography (HiPrep 16/60 Sephacryl S-500 HR; Cytiva).

### Example 19: Negative-Stained EM Data Collection and Analysis

[2384] This example describes visualization of anellovirus particles using negative stain electron microscopy. Jeol 1200EX transmission electron microscope was used for screening different Ring 10 constructs. 10 μl of sample was blotted on 400 mesh carbon support film (cf400-cu, EMS) for 30 seconds. After washing by ddH₂O for 30 seconds, the grid was stained by 0.75% of uranyl formate (UF) for 10 seconds before loading on the scope. Ring 10 delARM was further imaged at NanoImaging Service. 3 μl of 0.12 mg/ml was blotted to a continuous carbon grid and stained by 1% UF. Negative-stained electron microscopy was performed using a Thermo Fisher Scientific (Hillsboro, Oregon) Glacios Cryo Transmission Electron Microscope (cryo-TEM) operated at 200 kV and equipped with a TFS CETA-D 4×4 CMOS camera and a Falcon 4 direct electron detector.

### Example 20: Cryo-EM Data Collection and Data Analysis and Molecular Refinement

[2385] This example describes performing cryogenic electron microscopy (Cryo-EM) and data analysis, e.g., for determination of anellovirus particle structure. For the grid preparation, 3 μl of 0.3 mg/ml VLP sample was applied to a 1.2×1.3 graphene oxide grid. A total of 11,083 micrographs were collected from Glacios cryo-TEM (Thermo Fisher Scientific) operated at 200 kV with a Falcon 4 direct electron detector, at a nominal defocus range of −1.0-−2.5 m and accumulated dose of 19.59 e⁻/Å for a total of 15 frames in 3 minutes. The pixel size was 0.923 Å, with the magnification 150000×. Automated data-collection was carried out by Leginon software.

[2386] All micrographs were motion-corrected by Relion-4.0 implemented MotionCor2, and the contrast transfer function (CTF) parameters were estimated by Gctf. With manually picked particles from 20 micrographs to train the network, SPHIRE-crYOLO automatically picked 58,391 particles along with the PhosaurusNet network. All particles were extracted by Relion-4.0 and rescaled to 2-fold (pixel size 1.846 Å), followed by subsequence 2D classifications with 350 Å mask diameter to remove any junk particles. Two iterations of 2D classifications resulted in 11,185 particles, which were merged and reextracted to generate a de novo 3D initial model by Relion-4.0 with I1 symmetry. Notably, several similar initial models without symmetry imposed were obtained by Relion-4.0 and cisTEM. To obtain a better classification result, all particles were first subjected to a Refine3D with initial angular sampling 3.7° and local angular search 0.9° per step. The alignment parameters of each particle were transferred to a 3D classification with angular sampling interval 0.9° and local angular search 5° per step. 3D classification of the entire particle set attributed most of the particles into a single class. After CtfRefine and Bayesian polishing, the post-processing results in 3.98 Å resolution under the gold standard (with FSC=0.143).

[2387] The initial anellovirus TTMV-LY2 capsid monomer structure was predicted by TrRosetta, and Ring 10 structure was further predicted by RosettaCM. Structural refinement was performed by Rosetta and Phenix, and fine-adjusted by COOT. JA 20 and SAFIA structures are predicted by Alphafold.

### Example 21: Circular Dichroism Spectroscopy

[2388] This example describes performing circular dichroism spectroscopy to determine secondary structure of, e.g., an anellovirus ORF1 protein. To determine the secondary structure of the Ring 10 C-terminal domain, the peptides used to generate C-terminal antibodies (residues 635-672) were analyzed at 25.8 μM in PBS on a Jasco J-815 circular dichroism spectropolarimeter using 2 mm path length cell at ambient temperature. Each data set is the average of three consecutive scans. The secondary structure was determined by using CDPro software package, compared with a reference set containing 56 proteins (IBasis=10). The final secondary structure fractions were averaged over the results from three programs (SELCON3, CDSSTR, CONTINLL) in CDPro.

### Example 22: Anellovirus Particle Structure

[2389] This example describes determination of the particle structure of an exemplary Anellovirus.

[2390] Initial efforts to study the structure of a virus-like particle (VLP) derived from a TTMV isolate described herein as Ring 10, were done with the full-length ORF1 (residues 1-672) expressed in insect cells (Sf9). Full-length ORF1 was visualized by electron microscopy (as described in Example 19) and was observed to assemble into particles ˜32 nm in diameter (FIG. 14A), similar to previously reported estimates of anellovirus size. However, full-length ORF1 particles lacked the homogeneous symmetry expected of viral particles (FIG. 14A). Genome packaging by ARM-containing viruses is believed to occur when the positive arginine residues bind a negatively charged genome, overcoming electrostatic repulsion of the ARM to permit ORF1 assembly. Therefore, Ring 10 delARM, an ORF1 construct wherein residues 2-45 are deleted, was designed as described in Example 18 (FIGS. 11A, 11B, and 14B) to facilitate more efficient ORF1 assembly in the absence of viral DNA. Ring 10 delARM expression was confirmed using a rabbit polyclonal antibody raised against a spike domain peptide (residues 485-502; FIG. 11B) as described in Example 17. A band consistent with Ring 10 delARM was observed by western blot analysis (expected mass of 73.3 kDa; FIG. 11C) performed as described in Example 17. Ring 10 delARM yielded an ORF1 band above the 62-kDa marker (FIG. 11C). The difference in apparent molecular weight of Ring 10 delARM ORF1 after initial expression and after purification suggested proteolysis. To identify the site of proteolysis, polyclonal antibodies to peptides from the extreme N- and C-termini of Ring 10 delARM (residues 46-58 and residues 635-672, respectively; FIG. 11B) were generated as described in Example 17, and the presence of the N-terminal peptide of Ring 10 delARM on the purified fragment and the absence of the C-terminal peptide were confirmed (FIG. 11C).

[2391] Electron microscopy (EM) analysis of the Ring 10 delARM fragment showed the VLPs formed were more homogeneous and symmetric in morphology relative to full-length ORF1 (FIGS. 14A and 14B). The formation of homogeneous VLPs following genetic removal of the N-terminus and proteolysis of the C-terminus has been observed in another JR-containing virus, hepatitis E (HEV). To determine if the C-terminus of Ring 10 ORF1 is required for particle formation, VLPs from construct Ring 10 ORF1 delARM delCTD (wherein residues 2-45 and 552-672 are deleted) were generated as described in Example 18. Ring 10 ORF1 delARM delCTD produced VLPs of similar symmetry to Ring 10 ORF1 delARM (FIGS. 14B and 14C). These results suggest that proteolysis of the ORF1 C-terminus may be a natural part of anellovirus formation. In light of recent evidence that the C-terminal region of ORF1 is the immunodominant region of anelloviruses, its excision from the mature particle would be consistent with the immune evasion properties of anelloviruses.

[2392] The structure of the Ring 10 delARM particle was determined using cryo-EM to 3.98 Å resolution as described in Example 20 (FIG. 11D-11F, 15, 16A, and 16B; Table S1). The anellovirus particle was shown to be formed by sixty ORF1 fragments organized in an icosahedral T=1 symmetry (FIG. 11D). Electron density for residues 48-562 was observed (FIG. 11B). The resulting mass of the observed Ring 10 fragment was calculated to be ˜59.8 kDa. The N-terminal region (residues 46-228) forms part of the canonical 8-β-strand JR domain (β strands named B to H by convention). Unexpectedly, the eighth and final β-strand in the JR (strand I, residues 531-542) is located just prior to the C-terminal domain (FIG. 11B). The resulting fold of the ORF1 protomer has residues at the N- and C-termini generating the JR domain at the particle core while the intrastrand residues form the exterior of the particle surface. Intrastrand insertions forming the viral particle exterior can be found in other JR-containing viruses such as adeno-associated virus (AAV) and canine parvovirus (CPV). However, while the intrastrand insertions for AAV2 (228 residues) and CPV (227 residues) are between G and H β-strands, the 298-residue intrastrand insertion in Ring 10 is significantly larger and lies between β-strands H and I. The intrastrand region (residues 229-530) extends from the JR domain to form a structure herein referred to as a spike domain. The spike domain is formed by two globular domains: the spike P1 domain (residues 229-250 and 386-530) and the spike P2 domain (residues 251-385; FIG. 11B, 11E).

TABLE S1
Cryo-EM data collection, refinement and validation
statistics of TTMV-Ring 10 delARM.

| | Ring 10 delARM |
|---|---|
| Data collection and processing | |
| Magnification | 150000x |
| Voltage (kV) | 200 |
| Electron exposure (e−/Å²) | 1.31 |
| Defocus range (μm) | −0.5~−2.5 |
| Pixel size (Å) | 0.923 |
| Symmetry imposed | I1 |
| Initial particle images (no.) | 58391 |
| Final particle images (no.) | 6271 |
| Map resolution (Å) | 3.98/0.143 |
| FSC threshold | |
| Map resolution range (Å) | 3.9-6 |
| Refinement | |
| Initial model used (PDB code) | |
| Model resolution (Å) | 3.98/0.143 |
| FSC threshold | |
| Model resolution range (Å) | 3.9-6 |
| Map sharpening B factor (Å²) | −152.851 |
| Model composition | 253440/30900/0 |
| Non-hydrogen atoms | |
| Protein residues | |
| Ligands | |
| B factors (Å²) | 30.00/243.72/133.17 |
| Protein | |
| Ligand | |
| R.m.s. deviations | 0.007/1.282 |
| Bond lengths (Å) | |
| Bond angles (°) | |
| Validation | 2.36/25.43/0 |
| MolProbity score | |
| Clashscore | |
| Poor rotamers (%) | |
| Ramachandran plot | 92.6/6.62/0.78 |
| Favored (%) | |
| Allowed (%) | |
| Disallowed (%) | |
| CC (mask) | 0.81 |
| MolProbility | 2.36 |
| Clash Score | 25.43 |

### Example 23: Anellovirus Structural Jelly Roll Domains

[2393] This example describes the structure of anellovirus structural jelly roll (JR) domains. Sixty Ring 10 JR domains form the core of the virus particle (FIG. 12A-12D). The β-strands form β-sheets which are characterized by a C-H-E-F pattern on the core's exterior and B-I-D-G pattern on the core's interior. The N-terminus of strand B is oriented to place the ARM on the interior of the core, where it is positioned to bind the viral genome. The observed C-terminal residues (545-562) extend from the C-terminus of P3-strand I on the interior of the particle and thread through JR domains on the 2-fold axis to contact the neighboring JR domain (FIG. 12B).

[2394] In several JR-containing viruses, positively charged residues (arginine and lysine) oriented internally on strands B, I, D, and G are expected to bind the negatively charged viral genome (FIG. 12C). In Ring 10, basic residues Arg61, Lys62, Arg64, Lys66 (β-strand B), Lys140 (β-strand D), Arg197 (β-strand G), Lys533, Lys535, and Lys541 (β-strand I) are all oriented toward the particle interior and are likely responsible, together with the ARM motif, for binding the negatively charged viral genome. Notably, density suggesting bound nucleic acid was not observed, possibly because the ARM deletion prevented nucleic acid binding or because any host cell nucleic acid encapsidated by the VLP would be too heterogeneous for detection. Alignment of anellovirus ORF1 sequences revealed that several of these putative DNA-binding residues are conserved across species, which supports their role in DNA-binding (FIG. 12D).

### Example 24: Anellovirus Spike Domains

[2395] This example describes the structure of exemplary anellovirus spike domains, which include the P1 and P2 domains (e.g., as described herein). Residues 229 to 530 form the spike domain that extends ˜6 nm from the JR core (FIG. 13A-13D). A β strand (residues 245-250) extending from JR 3-strand H is the first component of the spike P1 domain and is N-terminal to the spike P2 domain (residues 251-385). The previously described hypervariable region (HVR) of ORF1 comprises the majority of the spike P2 domain. The remaining residues of the spike domain (residues 386-530) form five additional 1-strands and eight helices, which, together with the residues 245-250 strand, fold into the spike P1 domain. The local resolution of P1 is only slightly lower than the JR domain (˜4-4.5 Å), while the resolution of P2 is within 5-6 Å. This is likely a consequence of both being further from the radius of gyration and some flexibility of the HVR residues.

[2396] Neighboring spike domains pack together around the five-fold symmetry axis to form a ringed structure of 5 spike domains henceforth called the crown (FIG. 13A, 13B). A receptor for anelloviruses has not been identified to date. Given the diverse tropism of different anellovirus strains, it is possible that residues of the spike P2 HVR, which are the most surface-exposed, are involved in viral attachment and infection. However, the hypervariable sequence of the spike P2 domain may serve to aid in immune evasion rather than harboring a receptor-binding motif. If this is the case, a receptor-binding motif on the better conserved spike P1 domain, or even on the surface of the JR core, may exist.

[2397] Sequence alignment of the Ring 10 spike domain with other anelloviruses did not readily identify conserved spike surface residues (FIG. 13B-13D, FIG. 18; sequences reproduced below). In fact, the Ring 10 residues that are more conserved between other anelloviruses (e.g., Asp396, Pro429, Trp431, Gly437, Pro461, Phe477, Pro483, Trp500, Tyr501, Pro502, Gly518 and Pro519) are internal spike P1 residues supporting its globular fold. A few basic residues are semi-conserved on the spike P1 surface (e.g., Arg390, Arg481, Arg499, and Arg523) which could contribute to the particle's ability to bind heparin resin. A few semi-conserved hydrophobic or aromatic residues on spike P1 (e.g., Leu231, I1e236, Val245, Tyr404, Gly414, I1e424, Leu428, Leu432, Val450, I1e478, and Tyr484) are at least partially surface-exposed and could represent a conserved receptor binding surface (FIG. 13B-13D). If this is the case, then it is attractive to posit that anelloviruses have evolved their novel elongated H—I intrastrand spike domain to sterically hinder antibody binding to their cellular receptor-binding site present on the P1 surface using domain P2 which is able to tolerate highly diverse amino acid substitutions. This would allow diverse anelloviruses to repeatedly infect human hosts with minimal recognition and neutralization by the immune system.

Sequences included in sequence alignments (FIG. 18)
>Ly1 (Ring10)_orf1
(SEQ ID NO: 1012)
MPWWYRRRSYNPWRRRNWERRPRKTIYRRYRRRRRWVRRKPFYKRKIKRLNIVEWQPKSIRKCRIKGMLCLFQT
TEDRLSYNFDMYEESIIPEKLPGGGGFSIKNISLYALYQEHIHAHNIFTHINTDRPLARYTGCSLKFYQSKDID
YVVTYSTSLPLRSSMGMYNSMQPSIHLMQQNKLIVPSKQTQKRRKPYIKKHISPPTQMKSQWYFQHNIANIPLL
MIRTTALTLDNYYIGSRQLSTNVTIHTLNTTYIQNRDWGDRNKTYYCQTLGTQRYFLYGTHSTAQNINDIKLQE
LIPLINTQDYVQGFDWTEKDKHNITTYKEFLTKGAGNPFHAEWITAQNPVIHTANSPTQIEQIYTASTTTFQNK
KLTDLPTPGYIFITPTVSLRYNPYKDLAERNKCYFVRSKINAHGWDPEQHQELINSDLPQWLLLFGYPDYIKRT
QNFALVDTNYILVDHCPYTNPEKIPFIPLSTSFIEGRSPYSPSDTHEPDEEDQNRWYPCYQYQQESINSICLSG
PGTPKIPKGITAEAKVKYSENFKWGGDLPPMSTITNPTDQPTYVVPNNFNETTSLQNPTTRPEHFLYSFDERRG
QLTEKATKRLLKDWETKETSLLSTEYRFAEPTQTQAPQEDPSSEEEEESNLFERLLRQRTKQLQLKRRIIQTLK
DLQKLE
>Ly2 (Ring2) orf1
(SEQ ID NO: 58)
MPYYYRRRRYNYRRPRWYGRGWIRRPFRRRFRRKRRVRPTYTTIPLKQWQPPYKRTCYIKGQDCLIYYSNLRLG
MNSTMYEKSIVPVHWPGGGSFSVSMLTLDALYDIHKLCRNWWTSTNQDLPLVRYKGCKITFYQSTFTDYIVRIH
TELPANSNKLTYPNTHPLMMMMSKYKHIIPSRQTRRKKKPYTKIFVKPPPQFENKWYFATDLYKIPLLQIHCTA
CNLQNPFVKPDKLSNNVTLWSLNTISIQNRNMSVDQGQSWPFKILGTQSFYFYFYTGANLPGDTTQIPVADLLP
LTNPRINRPGQSLNEAKITDHITFTEYKNKFTNYWGNPENKHIQEHLDMILYSLKSPEAIKNEWTTENMKWNQL
NNAGTMALTPFNEPIFTQIQYNPDRDTGEDTQLYLLSNATGTGWDPPGIPELILEGFPLWLIYWGFADFQKNLK
KVINIDTNYMLVAKTKFTQKPGTFYLVILNDTFVEGNSPYEKQPLPEDNIKWYPQVQYQLEAQNKLLQTGPFTP
NIQGQLSDNISMFYKFYFKWGGSPPKAINVENPAHQIQYPIPRNEHETTSLQSPGEAPESILYSFDYRHGNYTT
TALSRISQDWALKDTVSKITEPDRQQLLKQALECLQISEETQEKKEKEVQQLISNLRQQQQLYRERIISLLKDQ
>MN773391.1|Beta|245_2239_2_fow
(SEQ ID NO: 2746)
MPPFRRNWWSNYYKPKWRRRRFPARRRRFTTTFRKRRRRIKKVKRHFYSKKYKRKLKKIILRQWQPSTIKRCKI
EGYLCLFQAGKGRFSFNYASYKESFCPEHEPGGGGWGLQQLSLSNLYSQNCDLMNWWTKSNNHLNLCRYMGCEI
TLFRQDTVDYVFTYFDEQPKNVSKYYYATFHPTKLMLYNRKIVVPSFASQPHKRKPYKRKFIRAPKLMKNQWYF
QQQLAPYPLLQFAATAVSLNKMFGSSKALNNNCTVYCLNTDFFRHPHFQYSAQPFTPDGGNQPTYIYTIQRGEP
PITAYKYFNLIFLGQTMTNDPGIPLSNNNNYTKNEWGNVFFYKYLNNDELTYVSKETIDQVKQKKNQQITSGFT
LKDQPYYYTLKYNPYKDKGKGNQAYWVSNIEATKQNWEPPNDPDLIISDFPFWIMLWGWEDMTKRIGKCRNLDN
DWILVLRTQYFSDKMTAYVPLSEAFIHGQGPYFVDRSEIKGQDYAHWYPRYRYQREAIENILMTGPMVCRADNI
NNIQSLIKYKFFFKWGGTPATMENVYDPMSQPITPSPNNLISTNEIINPETSIDNYIYKWDTRRDILTQKATDR
ITKSSTYDSNVFTDGRETSTDIPLFQTTQKAPQEETPETQAETLLLQLHQLQQFNLQLQQRENNLKQLMQNI
>MN769198.1|Beta|265_2235_1_fow
(SEQ ID NO: 2747)
MPWYNYWPRRRRLRRYWRRPRKTLRRRYWRRPRWVRRPYKRKLRKIVLTQFQPKTIRKSKIKGPICLFQTINKR
LVNNFDMYETSEVPEHQPGGGGWGIKVFTLEGLYSEHIYGRNIWTVTNQDLPLVRYLGCSIRFYQSEYTDYVAT
YSNQLPLQSSLGMYNAMQPNIHLLLKNKITMPGLKTYKRRVPYKKVFVPPPTQLENKWYFQQNIAKTPLLMTRV
TACSLNKFYIDPDHINTNLTITSLNVSLFSNRQFQDATDYHPKTVGTINYYLYSTTQNPPYNGPLKLKMLIPLT
DTMIYKPGINYEEYKRNNTTKGWNDWKTEYTIYSGNPFHANYLSVGEPVFLIGKKPSDLESSEEGETSDYTTAE
LIKTIRYNPYNDQGQTNICYFKANFKSETTWQPPDNPDLINENLPFWLLLWGFSDWHKKIKKHLHIDSSYILVM
RHIPLALNTEYIVPLSDSFLQGKSPFSPEEQPIGADRTTWHPQFQHQAEAINTICSSGPGTTKIPDNYSVQGLM
KYSFYFKWGGSPPPMSTIEDPIQQPTYPVPHNFNLTTSLQNPETDPASILWSFDQRRHTLTKKAIERLQKDIGI
KTITVTGGSHFDPTPTISQEETSEESSEEEKETSLLEKLQQQQRQQRRLKLRIMKILLKIQQLE
>MN774797.1|Beta|244_2262_1_fow
(SEQ ID NO: 2748)
MPWRRRRYFRRYRYRPRRWRPRKTFRTRYYRRRHWVRKKRLRKKLKKLHITEYQPSSIRKCKVKGILCLFQTSI
ERICYNFDMYEESIVPDRLPGGGGFSIKNLSLQSLYLEHTHGHNIFTSTNEPYPLMRYTGCTIRLYRSADVDYI
VSYDNQWPLKSTMKMYNSMQPQIHYLLRHRIIVTSKKTNPNKRKLYKKVFIPPPTQMKNQWYFQSTLANIPLFM
LRTSATSLDHWFIGTRDKSTNITILTLNTSVIFHRNWDKGTQPYYANVVGTQKVWLYATDQSASPIFNEIKLKN
LIFLGNTQHNTQGYSYAEYLTHYHKTHSSTTVEEWQKSANWGNPFYKDYLTNPSNDHQVFASYTDILQFANKLK
TSQDTTIKESTFSFTPIEMTKRLRYNPYKDNGVNNLCYFLNCKEVNGLSWDQPHNPDLINENLPLWILLFGFSD
FQKKLAKLKRIDTDYTFVIKSTYTEPTHLYIVPINISMSEGHSPYEDQANFVDDDKWFPSFQFQQEAYTDICLS
GPGTARIPKGDTAEAKMHYTFHFKWGGELPDMEQIADPSEKPTYPIPNNFLSTTSLQNPTQAPETYLYKFDQRG
DYITKTAAKRIRKDWSTKTDSLSITAPRFAEAAQTQDTSTETTSEEEEEEDLFQQLNQQRLKQQRLKQRIKLIL
QKLQTT
>AF122914.3|Alpha|417_2726_3_fow (JA20)
(SEQ ID NO: 1020)
MAYGWWRRRRRRWRRWRRRPWRRRWRTRRRRPARRRGRRRNVRRRRRGRWRRRYRRWKRKGRRRRKAKIIIRQW
QPNYRRRCNIVGYLPILICGGNTVSRNYATHSDDTNYPGPFGGGMITDKFSLRILYDEYKREMNYWTASNEDLD
LCRYLGCTFYFFRHPEVDFIIKINTMPPFLDTTITAPSIHPGLMALDKRARWIPSLKNRPGKKHYIKIRVGAPK
MFTDKWYPQTDLCDMILLTIYATAADMQYPFGSPLIDTVVVNSQVLQSMYDETISILPDEKIKRNSLLTSIRSY
IPFYNTTQTIAQLKPFVDAGGHTTGSTTTTWGQLLNTTKFTTTTTTTYTYPGITNTAVIFITANDTWYRGTAYK
DNIKDVPQKAAQLYFQTTQKLLGNTFHGSDETLEYHAGLYSSIWLSPGRSYFETPGAYTDIKYNPFTDRGEGNM
LWIDWLSKKNMKYDKVQSKCLVADLPLWAAAYGYVEFCSKSTGDTNIHMNARLLIRSPFTDPQLIVHTDPTKGF
VPYSLNFGNGKMPGGSSNVPIRMRAKWYPTLSHQQEVLEALAQSGPFAYHSDIKKVSLGIKYRFKWIWGGNPVR
QQVVRNPCKEPHSSGNRVPRSIQIVDPRYNSPELTIHAWDFRRGFFGPKAIQRMQQQPTATEFFSAGRKRPRRD
TEVYQSDQEKEQKESSLFPPVKLLRRVPPWEDSEQEQSGSQSSEEETATLSQQLKQQLQQQRVLGVKLRLLENQ
VQKIQQNQDINPTLLPRGGDLVSFFQAVP
>MN766736.1|Alpha|422_2692_2_fow
(SEQ ID NO: 2749)
MPWWRWRRGWRWPRRRWRTYRRRRRLPRRRPRRAVRRPRRRRVRRRRGRGWYRGRRYSRRLYRRRYVRRKRKTL
IWRQWQPQNIRKCRIRGIIPMIICGHLRSNRNYALHSDDIVEQNTPFGGALSTTSWSLKVLYDQHQRGLNRWSS
SNEMLDLARYNGCRFTFYRDKVTDFIVTYDISAPYKLDKYSSPSYHPGMMMLKTKNKILIPSFNTKPKGRSTVS
VKIKPPKLFLDKWYTQEDLCTVNLVTFAVSAASFTHPFCPPQTDNPCCTFQVLKDFYYPIIGYSAAETKVSSVE
SNILYKHCTYYQSFLTQQFIGKIVKLPDGTLVSSLASGPSSYPEGSNINKNSIEQYNTWLSQFNTGANQHYNFC
NYKPDYSKLEWLRKYYFEWETYKKASIPPDHLTPSVNWYEYHIGLFSPIFLSPFRSSSLEFPRAYQDVTYNPLV
DKGVGNVIWFQYNTKADTQLTLPSCKCVIEDIPLWAAFYGYSDFVQQEIGPYTDAESVGLVCVICPYTKPPMKN
PDNPMMGYVFYDSNFGAGKWIDGSGFVPLYWQTRWRPETLFQESTMRDITMTGPFSYKDELKNTVLTAKYKFNF
RWGGNLLHEQTIRNPCPTNAHPSTGRQPRDVQVVDPITVGPRFVFHSWDWRRGELSEAAIKRIRDQPLDYEAYS
FMPKRPRFFPPTTGGEQLPGEQEESSSSAEENNLISFEEGQEPKAQAVHKQLLKHLRKQRVLGQRLRALYQNLQ
KTQAGLHINPLLFSQA
>MN765841.1|Alpha|389_2635_2_fow
(SEQ ID NO: 2750)
MAWRWWWRRRRPWPYRRRRWRTIRTRRPRRPVRRRRRRRRVRRRRWGRRRGRRTYYRRRFRKKKRKRKKLVLKQ
WNPSTIRRCTITGMIPLIVCGHTSAGRNYALRSDDFIPQSQPFGGSFSTTTWNLNVLYDEHLKFHNKWSYPNTQ
LDLARYLGAYFYFYRDPKTDFIVTYNTVPPFKIDKYSSPMLHPGMLMQRKKRILIPSFETRPKGKRRIRVKIKP
PTLFEDKWYTQSDLCSVNLLSLAVSAASFKHPFCPPQTENICITFQVLRDFYYTQMNVTDTKGTDISDKDKAIF
DNHLYKFANYYQTVHTLGQLNPTQQPALFSDRQNQGIPEKDSYLSGIGPNKLQTGNNSIYGQPNYNPDIEKLHK
IRKWFFKQETTANTIHGQYGHPQNDAVDYHIGKYSPIFLSPYRINLQFPTAYVDVTYNPLVDKGLGNKMWIQSV
TKSDTQFNELNCKCVLQDIPIWAMATGYAEFIESELGLQEEVYSVYIICVICPYTQPKMYSDTNVNTGYVFYDS
LFGDGKMPSGTGLVPFYYQSRWYPRLRFQLQVLHDMYICGPFSYKDDLKSTVLTAEYKFRFLWGGNMIPEQVIR
NPCKAEGAGSGYTYPDRLPRDLQIADPQTMGPEWAFHTWDWRHGLFGKGALKRVSEKPDYDADYYVLPKKPRFF
PPTDGSQGQEKDSDLQEISLPFPFEETLSKSQEEVQTQQQQRDLHLRLAQQQRLGQQLKHLYTQILKTQAGLHI
NPLLYNHV
>MN765502.1|Alpha|417_2624_3_fow
(SEQ ID NO: 2751)
MAYWWWRRRRRRPWRRRRRWRLRRPRRRRATYRRRRGRRRVRKRRGRWRRTYRRWRRRKGRRRHKKKIIMKQWQ
PNFIRHCFIVGFMPLIFCGENTTSQNFATHSDDLVAKGPYGGGMITTKFTLRILYDEHLRFMNFWTVSNEDLDL
CRYLGVKLTFYRHPTVDFMVQIHTQPPFLDTELTGPSIHPGMMILNKKKIFVPSLKTRPNRKHKVRVKIGPPRL
YEDKWYPQSELCDTTLLTVYATACDLQFPFGSPLTDNPCVNFQVLGSAYKKHLSILSTNDSKNLTHYETALFSK
TAYYNTFETIAQLKPTGQTTGVTPTWQDVQNTINLDSSGINQATSNDTWYYGNTYKDNIKDLTKKARDRYLAAT
QKAFPAYATLQSPLYEYHGGCYSSIFLSAGRAYFETLGAYSDIIYNPFVDKGIGNMVWIDYLSKEDAVYTPRIS
KCLIRDQPLWASFNGYSEFCSKSTGDGAVNINTRVVIKCPYTTPMLADNSNENQGFVPYSLNFGKGKMKGGSSQ
VPLSWRCKWYVMMYHQQEFMEAIVQSGPWAYKGDEKSAVLAMKYVFNWKWGGNPISGQVVRNPCKTSSSSREPR
SIQAVDPKRVAPPLVFHSWDYRRGLFGHASIKRMSEESATPTLFTGPAGKRPRRDTSVQQAEEDQQKESSSFRV
QRQLQPWIHSSQETQSSQEEMQAQGTVQEQLIQQLGEQRALRKQLEFLASQVLKVQAGQHIHPLLSSQA
>MN765788.1|Alpha|401_2629_2_fow
(SEQ ID NO: 2752)
MAWRWWWNRRPRRRWTRRRWRRLRTRRPRRPVRRRRRRRRVRRRRWGRRRGRRTFYRRRFKKRRRRRRKLTLKQ
WNPSTIRKCSIRGTVALVMCGHTKAGRNYALHSEDYVPSLISMGGSFSTTTWSLKALYDEFQKFHNRWSYPNTQ
LDLARFKGSKWTFYRDPKVDYIVTYYTVPPFKLNKLSSPFLHPGMMMQYKKKILVPSYQTKPKGKGKVSIWIKP
PVLFEDKWYTQQDLCPVNLLSLAVSAASFLHPFCPPESDNMCITFQVLQDFYYTQMGVTQMTGTTLTEADNNIF
KNHLYKQASYYQSLHTTGQLNATQKPANYSINDKIPQETWLSTTGPAGFKTGNNSIYGVPNYKPDYTKLEEIRK
WFFKQETTDNAIHGSYGKPVYNAVDYHIGKYSPIFLSPYRTNTQFSTAYRDITYNPNTDKGKGNHIWIQSVTKT
NTTLNSQCRCHIQDIPIWAAVTGYAEFCESELNSEVHNLYICCIICPYTKPKLYNNTDPTQGYVFYDTLFGDGK
MPTGTGLVPVWLQSRWYPRLIFQAQVLHDLYLTGPFSYKDDLKSFTISAKYNFKFLWGGTIIPEQVIKNPCKEQ
DSPFTFTGRQPRDLQVTDPQTMGPEWVFHTWDWRRGLFGENAIKRVSEQPSHDADYYAPPKKPRLFPPTDLQEQ
ESAFDFTPQELKILSEAPQQSEEEENQEEEQQLQQRELQLRLQEQFRIRHQLQHLFVQVLKTQAGLHINPLFLN
PV
>MN779270.1|Gamma|312_2300_3_fow (SAfiA)
(SEQ ID NO: 2753)
MPFWWRRRRKFWINNRFNYTKRRRYRKRWPRRRRRRRPYRRPIRRRRRKLRKVKRKKKSLIVRQWQPDSIRTCK
IIGQSAIVVGAEGKQMYCYTVNKLINVPPKTPYGGGFGVDQYTLKYLYEEYRFAQNIWTQSNVLKDLCRYINVK
LIFYRDNKTDFVLSYDRNPPFQLTKFTYPGAHPQQIMLQKHHKFILSQMTKPNGRLTKKLKIKPPKQMLSKWFF
SKQFCKYPLLSLKASALDLRHSYLGCCNENPQVFFYYLNHGYYIQTNWGAQSTTAYRPNSSVTETTYYKYKNEK
KNIHIKSSEYSESISYDKGYFQSSFLQTQCIYTSAAGDTCAAEKPLGIAIYNPVKDNGDGNMIYLVSTLANTWD
QPPKDSAILIQGVPIWLGLFGYLDYCRQIKADKTWLDSHILVMQSPAIFTYPNPGAGKWYCPLSQSFINGNGPF
NQPPTLLQKAKWFPQIQYQQEIINSFVESGPFVPKYANQTESNWELKYKYIFTFKWGGPQFHEPEIADPSKQEQ
YDVPDTFYQTIQIEDPEGQDPRSLIHDWDYRRGFVKERSLKRMSTYFSTHTDQQATSEEDIPKKKKRIGPQLTV
PQQKEEETLSCLLSLCKKDTFQETETQEDLQQLIKQQQEQQLLLKRNILQLIHKLKENQQMLQLHTGMLP
>MN778499.1|Gamma|300_2288_3_fow
(SEQ ID NO: 2754)
MPFWWPRRRRWWATTRFKRRKPRYPKRRRRRRYKRKYRRAPRRRRRRRRKVRRKKPNLIVRQWQPDSIVLCKIK
LFGSLVLGAEGTQYLCYTNEKGAWTPPQQPGGGGFGIETYSLSYLYDQYLLRRCIWTKSNDYKDLCRYLRCKIT
FFRHPKIDFVVNYARQPPFLLEKPTYMNCHPIALLLSQHKRVILSKRSDPKAKNRVTLIIKPPKQMITKWFFTK
QFALFDLLQIQAAACTLNYPKLGCCNENLIISIFYLNPQFFQDSQWAQYTTSPYKPYQTIDTQLTYHYKIGNQT
GQYKPEFLNKTGQQAYYESISLDKGWFSPKIMNTQYITQSGSETHLAAIPVGAARYNPEIDDGKGNEIYLVSVT
TGHYTKPSEDNLVFRGLPLWLMFFGLYSFIKKIKTASFLPLHMFVVKSEYILPKPKDPQKQYFPFVDLNFINGK
NPYNSYISSTQRQTWYPTCEHQVETINAFVKCGPFVPKLDNDRDSTWELPFKSTFYFKWGGPQMPNQNVSDPKD
KTSYIVPDTVQEGLQITNPLKQKAESLLHEWDYRRGLIKTKAFKRMLENLSIESDVYPSAETPRKRQRVENSLH
YQEEENQEIKTCLLSLCESSSSEKEEEEKNLLHLIQQQQQQQKQLKLQLLTLIKDLKEKQNALQLQTGVI
>MN776710.1|Gamma|288_2279_3_fow
(SEQ ID NO: 2755)
MPFWWRRRRKPWYGKWRFRRRRRYNAPRRKRKFYQRRRYRRTNRRRRKYKVRRKKRKTIAIRQWQPESITKCKI
IGFSNLVLGAEGTQYLCWTSQQEDYTQPKAPGGGGFGCELINLDWLYSEWVKHNNIWTKTNTNKDLVRYTGAYI
YFLRHPTIDFVIAYSLQPPFELTKFTYPDIQPQNLLLRKRKRIILSLASKPHGKRFVKVKIRPPKQMITKWFFQ
HQFSGYGLVQLSAAAATFRHPNIGPKSQNQMVTIYFLDTTIFNRPNWAQAQEDAWTPAGTHRTWTFEYQVKGQT
QPKTVQMPPSTPQDPYKTKYATSISRDYGWWQKAILNSTKVTIDGTMYSNRTVYSARYNPNEDTGQGNAVYLVS
LLQSKWTAPSDDRLVIVGQPLWMCMYGLYSYYQDLLKDKNFNTHYMFVVRSPAIKPITVSRQDFYPFIDWDFIN
GVLPWEEYLSEKIKATWYPQATFQTTTINALVESGPFVPRLINIPDSTWELVYKYKFFFKWGGPQTHDDHVQDP
KHQPDYDTPDTLHQTIQIGDPKKQTPESIIHEWDYRRGFITQTALKRMSENIQTDTDFQSDDSASPRKKRKVTK
KMPITSQKEENIKKCLLSLCQEETQETPENLQDLIQQQQQQQHLLKRNLLQLLTHLKQQQRYLSLQTGILD
>MN777204.1|Gamma|313_2331_1_fow
(SEQ ID NO: 2756)
MPFWWRRRRKFWRGRRRPFYKRITKRRRRRVRYRQRFRRPYRRRRRRRKHKVRRKRQKLPIYQWQPDSIRKCKI
KGVGTLILGAHGKQFVCYTDVQKKAPPPKAPGGGGFACEQFSLGGLYEQYKFRNNIWTASNINMDLCRYLGVRM
IFYRHPDIDFILNYDRQPPFVLDQLTYPLCHPQNLLLGKHKILLLSKATKPNGKLRKKVFIKPPKQMLNKWFFQ
EQFQSAPLLSIRASICSLQYPHIGCCMPNRTVTFFALNPGFYQQGNWAYDGGETNPYKPWPHIPKKLYFWDVAT
IPASWMEQEKAKHRVEIDLSTYSQSIDYQKGYFISKVLQAKLVTQDSTGISTIANTPLNIARYNPAIDTGKGNT
IWLHSNLTTAYTKPAVDKTVILEGLPLWMMLFGWLSWVQHVKGAPDFYLSYTLCVESPAIEIATKGETINPVIP
LDASFINGNAPYNQTISQKDLTHWYPDIYNQTEIINSIVTSGPYIPKLDNIKNSTWELHYYYQFFFKWGGPEIT
DQPVADPSKQPVYDALDKQQQGIQVRNPAKQKYATLMHPWDIRRGIITNKALKRMQQNLSIDSTFEAGSTPAKK
PRITGPCFTALQEIHQEERSCLQTLCKESTSQEAQEETDIQLLIAQQQQKQRELKYNLLKLISYMKEQQNMLKL
HTGMLN
>MN777719.1|Gamma|319_2301_1_fow
(SEQ ID NO: 2757)
MPFWWGRRNRFWYKNNYRRRAYRRKRKRWPKRRRRNFRRPTRRRRRRRRKQKVRKKKQTLTLKVWQPDTIRKCK
IKGTGIHIVGGNGTQYRCFTANRFDWTPPLMPGGGGFGVEKFTLQHLYNEHLLSNNIWTQSNKMLDLVRYTGCR
IKFYRHETIDFIASYNRNLPFNLEKYTYADSHPNSLLHSRHKKLIPSLKTRRSGKRYITMKIKPPKPVSNKWFF
QETFSSTPLFKLITSIIDLRYPHISQIGSNELVSLFCLNTDFYANAGWGNVHPPGTHSKWYVPYHNIAAITTVV
IKGRDTQITVDGSDYKKSVSYETGYFQPKLLQAEKIKNTAMENIPIQASRYNPTKDDGVGNKLWLVNVLNYSFA
PPKIDADLYIENLPLWQLVWGFTDFVKQTKKDSTFLNTYYAAFESKYLEPAVSTSKIYIPIDMSFIQGKGPYDS
YVSNYRKQNWYPILNAQLKTLNAIAQAGPFVPKLDNIFLSSWELYSNYTFYFKFGGSELPEPDTVNPQDQGTYV
IPTNIQKAIQVSNPQKQSPYTTLHSWDYRRGLITSSAFKRMCENQTTDTEFEPDTETIPKKKKKIQHGNQLQRA
EEETQEIQNCLLSLCEENTFQETPQTSLLELIQQQQQQQQQLKHNLLKLLSDLKLKQRSLQLQTGLIH

### Example 25: Evasion of Immune System

[2398] This Example describes the anellovirus C-terminal region and its relation to immune evasion. Absent from the Ring 10 structure is the majority of the C-terminal region (residues 545-672). Observed density for residues 545-562 showed that, were the C-terminal region present on the wild-type virus, the C-terminus would extend from the JR core toward the surface near the 3-fold axis between the spike domain crowns. The C-terminal region is semi-conserved between all anelloviruses, is predicted to be helical in nature, and has a glutamate-rich region (residues 636-640 on Ring 10) which could N-terminally cap a conserved helical motif. To determine if the C-terminal residues of Ring 10 would form a helical structure, circular dichroism experiments were performed, as described in Example 21, on the C-terminal peptides used to generate the aforementioned antibodies. Indeed, analysis with circular dichroism suggested that the C-terminal region (residues 635-672) is helical in solution, suggesting the C-terminal region would form a coiled-coil domain (FIGS. 17A and 17B), strongly suggesting a leucine-zipper like association of the helices perhaps due to the periodicity of hydrophobic residues. Electron microscopy of full-length Ring 10 ORF1 vs ORF1 which either had the C-terminus proteolytically removed or genetically removed suggested that particle formation is improved with the absence of the semi-conserved C-terminus (FIG. 14A-14C). Given that anelloviruses have evolved to evade the immune system, and that the C-terminal region is the immunodominant region of ORF1 and may be antagonistic to particle formation, the semi-conserved C-terminal region may be required for wild-type particle assembly but processed during viral particle maturation.

[2399] Despite anelloviruses constituting the majority of the human virome, their capsid structure was unknown. Determination of the Ring 10 structure as described by the examples included herein demonstrates that ORF1 encodes the capsid protein and that anelloviruses evolved a novel spike domain that extends around the 5-fold axis to form a crown structure. These crowns are capped with hypervariable P2 regions, which likely inhibits the development of antibodies against the better conserved spike P1 domain via steric hindrance. Analysis of the P1 surface revealed conserved residue patches that may have a receptor binding function.

[2400] The structure of the Ring 10 Betatorquevirus can be used to guide future anellovirus research. In particular, the diversity and immunological stealth of anelloviruses indicates that they could be used to deliver therapeutic genes to cell types not currently addressed by existing vectors, and that they may be less susceptible to pre-existing immunity or to the development of neutralizing antibodies following initial treatment. The availability of a capsid structure will help guide the design of anellovirus-based gene therapy vectors.

### Example 26. Grafting of HVR Helix Motif Between Anellovirus ORF1 Proteins

[2401] In this example, a peptide sequence in the structural hypervariable region (HVR) of the Ring 10 ORF1 protein was identified as a surface epitope. The surface epitope can, for example, be recognized by polyclonal antibodies to aid in analytical and purification development. Briefly, polyclonal antibodies (PAbs) were generated to Betatorquevirus strain Ring 10, guided by structural prediction of the viral particle formed by ORF1. The Ring 10 structure, determined as described herein, confirmed that a key helix (residues 352-361, having the amino acid sequence SPTQIEQIYT (SEQ ID NO: 2503)) is surface exposed in the viral particle.

[2402] A PAb that recognizes Ring 10 HVR helix 352-361 PAb (AB3725) was shown to recognize Ring 10 anelloVLPs purified through SEC (FIG. 20). In addition, a series of point mutations at positions 357, 358, and 359 in in Ring 2 ORF1 to the corresponding residues of Ring 10 ORF1 (i.e., point mutations K357E, N358Q and E359I) allowed for recognition of the mutant Ring 2 ORF1s by AB3725 by western blot (FIG. 21A-21B). Lastly, a full helix swap of amino acids 357-359 from Ring 10 to Ring 2 ORF1 was recognized by AB3725 via western blot.

[2403] Without wishing to be bound by theory, it is contemplated that the HVR helix residues of Ring 10 (i.e., residues 352-361) can be grafted as ELISA epitopes into the ORF1 proteins of other Anelloviruses for purification or analytical purposes.

### Example 27: Production and Purification of AnelloVLPs

### Ring2 AnelloVLP:

[2404] A plasmid that encodes Ring2 ORF1 with a deletion of the C-terminus amino acids 611-666 (pRTx-2652; see also Table X1 construct listed as Ring2delCterm (A611-666) (7047)) was transfected into Expi293 cells. The cells were collected and resuspended in lysis buffer (50 mM Tris HCl, pH 8, 250 mM NaCl, 2 mM Magnesium Chloride). EDTA (0.5M) and protease inhibitor were added, and the cells were lysed using a microfluidizer. After lysing, protein inhibitor and triton X were added to the lysate and incubated for 30 minutes. The lysate was centrifuged at 12100 rpm and the supernatant was collected.

[2405] The lysate supernatant in 50 mM Tris HCl pH8, 250 mM NaCl was passed through a HiTrap heparin HP column (Cytiva) to separate 60mer VLPs from other smaller proteins from the mixture. The VLP fractions were dialyzed into Capto buffer (50 mM Tris HCl pH 8, 100 mM NaCl) overnight and incubated for 1.5 hrs with Capto400 resin at a 1:10 ratio of resin to protein. The preparation was spun down and supernatant collected.

[2406] Samples were loaded onto a gel and Coomassie stained (FIG. 22A) or a Western blot was performed using a Ring2 HVR Linker primary antibody raised against amino acids 284-319 of the HVR region of Ring2 ORF1 and a goat-anti-rabbit secondary antibody (FIG. 22B). The lanes were as follows:
[2407] Lane 1: Ladder
[2408] Lane 2: Blank
[2409] Land 3: 2652 unpurified material
[2410] Lane 4: Blank
[2411] Lane 5: Ring2 AnelloVLP 2652 after Capto400 purification

[2412] Both gels show a relatively pure preparation of Ring2 VLPs after Capto400 purification (see lane 5).

[2413] Electron microscopy of the preparation obtained after Capto400 purification confirmed Ring2 VLP formation at 65000× magnification (FIG. 23).

### Ring19 AnelloVLP:

[2414] A plasmid that encodes Ring19 ORF1 with a deletion of the C-terminus amino acids 600-655 (pRTx-2814; see Table X1, construct Ring19delCterm (A600-655) (7120)) was similarly transfected as above into expi293 cells. The cells were collected and resuspended in lysis buffer (50 mM Tris HCl, pH 8, 250 mM NaCl, 2 mM Magnesium Chloride). EDTA (0.5M) and protease inhibitor were added, and the cells were lysed using a microfluidizer. After lysing, protein inhibitor and triton X were added to the lysate and incubated for 30 minutes. The lysate was centrifuged at 12100 rpm and the supernatant was collected. The supernatant was then purified through the HiTrap Heparin HP column and dialyzed into the Capto buffer as described above. The VLP preparation was then purified through a Capto400 column to further separate the VLPs from smaller proteins. Fractions “C12”, “D1”, and “D2” are different fractions collected during purification that showed peaks on the chromatogram. Samples from fractions C12, D1, and D2 were loaded onto a gel and Coomassie stained (FIG. 24A) or a Western blot was performed using a Ring19 HVR3 primary antibody that was raised against amino acids 342-352 of the Ring19 ORF1 HVR region (FIG. 24B). The lanes were as follows:
[2415] Lane 1: Ladder
[2416] Lane 2: Ring19 AnelloVLPs post heparin purification
[2417] Lane 3: Ring19 AnelloVLPs post dialysis
[2418] Lane 4: Ring19 AnelloVLPs capto400 C12 fraction
[2419] Lane 5: Ring19 AnelloVLPs capto400 D1 fraction
[2420] Lane 6: Ring19 AnelloVLPs capto400 D2 fraction

[2421] Both gels show Ring19 VLPs after capto400 purification.

[2422] Electron microscopy of the preparation obtained after Capto400 purification confirmed Ring19 VLP formation at 65000× magnification (FIG. 25).

### Example 28: Conjugation of AnelloVLPs

[2423] In this example, NHS ester moieties were conjugated via click chemistry to the surface lysines of the AnelloVLPs prepared according to the example above. The conjugation workflow is shown in FIG. 26.

[2424] The preparations of the AnelloVLPs prepared above were buffer exchanged into 50 mM sodium borate pH8.5 overnight and NHS ester 647-Alexa Fluor™ (“NHS Ester 647”) (Succinimidyl Ester), (ThermoFisher Catalog number: A20006) (for Ring2 AnelloVLPs) or EZ-Link™ NHS-Biotin (“NHS-Biotin”) (ThermoFisher Catalog number: 20217) (for Ring19 AnelloVLPs) were added in varying VLP: NHS Ester molar ratios and reacted for 1 hr at room temperature or overnight at 4° C. The reactions were stopped by addition of 10 mM Tris HCl, pH7.4. The preparations were further desalted in PBS pH7.4 to remove extra free NHS ester moieties. Gels or Western blots were run to confirm conjugation.

[2425] FIG. 27A shows a Coomassie stained gel and FIG. 27B shows a gel scanned under 520 nm of Ring2 AnelloVLP conjugated with NHS Ester 647. The lanes shown are as follows:
[2426] Lane 1: ladder
[2427] Lane 2: Ring2 AnelloVLP 2652 unlabeled
[2428] Lane 3: Ring2 AnelloVLP 2652 labeled at 1:5 VLP:NHS Ester 647 molar ratio, no desalt
[2429] Lane 4: Ring2 AnelloVLP 2652 labeled at 1:10 VLP:NHS Ester 647 molar ratio, no desalt
[2430] Lane 5: Ring2 AnelloVLP 2652 labeled at 1:20 VLP:NHS Ester 647 molar ratio, no desalt
[2431] Lane 6: Blank
[2432] Lane 7: Ring2 AnelloVLP 2652 labeled at 1:5 VLP:NHS Ester 647 molar ratio, desalted
[2433] Lane 8: Ring2 AnelloVLP 2652 labeled at 1:10 VLP:NHS Ester 647 molar ratio, desalted
[2434] Lane 9: Ring2 AnelloVLP 2652 labeled at 1:20 VLP:NHS Ester 647 molar ratio, desalted

[2435] The Coomassie-stained gel shows Ring2 AnelloVLPs at around 62 kD as expected in all protein-containing lanes. The gel scanned under 520 nm shows no visible band in lane 2 (unlabeled Ring2 AnelloVLP) while the other lanes containing labeled AnelloVPs show visible bands at about 62 kD, confirming the conjugation of Ring2 AnelloVLPS with NHS Ester 647.

[2436] FIG. 28A shows a Western blot with a streptavidin CV 800 antibody [Licor Bioscience-Catalog number P/N: 926-32211] and FIG. 28B shows a Western blot with the R19 HVR3 primary antibody described above and a goat-anti rabbit secondary antibody. The lanes shown are as follows:
[2437] Lane 1: Ladder
[2438] Lane 2: Ring19 AnelloVLP unlabeled
[2439] Lane 3: Ring19 AnellovLP labeled at 1:5 VLP:NHS Ester biotin molar ratio [desalted]
[2440] Lane 4: Ring19 AnellovLP labeled at 1:10 VLP:NHS Ester biotin molar ratio [desalted]

[2441] The Western blot using the Ring19 specific antibody shows visible bands at around 62 kD in both the unlabeled and labeled Ring19 AnelloVLP samples. The Western blot with streptavidin shows a band at around 62 kD with Ring19 AnelloVLPs labeled with NHS Ester biotin while the unlabeled Ring19 AnelloVLP shows no visible band, confirming the conjugation of Ring19 AnelloVLPs with NHS Ester biotin.

### Example 29: VLP Conjugation to SARS-CoV-2 RBD Peptide

[2442] In this Example, a His-Tag recombinant receptor binding domain (RBD) comprising amino acids 319-541 from SARS-CoV-2 coronavirus spike protein (ThermoFisher Catalog #RP-87704) (referred to in this example as RBD) was conjugated to the surface of AnelloVLPs. As shown in FIG. 29, the conjugation involved a first step of conjugating NHS-DBCO to the surface ORF1 of anelloVLPs. Azide-labeled RBD effectors were then conjugated to the anelloVLPs via the DBCO linker. This approach can be generalized to attach azide-labeled effectors (e.g., antigenic peptides and proteins) to anelloVLPs with DBCO linkers on their surfaces.

[2443] First, RBD was labeled with either DBCO or Azide to confirm that RBD could be labeled for future conjugation to AnelloVLPs. In brief, 100 μg of the His-tagged recombinant RBD (ThermoFisher Catalog #RP-87704) was resuspended in 1 ml of sodium borate buffer (pH=8.5) to final concentration of 0.1 mg/ml. The RBD amino acids from 319-541 contains 11 lysines that could potentially be labeled by NHS. Thus, in one condition, 2 μl of DBCO-PEG4-NHS 1 mg/ml was added to 200 μl of 0.1 mg/ml RBD and incubated overnight at 4° C. (2 μg DBCO-PEG4-NHS: 20 μg RBD). In a second condition, 2 μl of Azide-PEG4-NHS at 1 mg/ml was added to 200 μl of 0.1 mg/ml RBD and then incubated overnight at 4° C. (2 μg Azide-PEG4-NHS: 20 μg RBD). The next day, a zeba desalting column was prepared by opening the bottom of a column and placing it into a microfuge tube, spinning at 1500 g for 1 min at 4° C., adding 400 μl of Borate buffer (50 mM sodium borate) and spinning at 1500 g for one minute and then discarding the flow-through. This process is then repeated 3-4 times and the column is then placed into a fresh microfuge tube.

[2444] Unreacted DBCO/Azide was desalted out of the samples by running through a desalting column for two minutes at 1500 g and at 4° C. Samples were then split as follows:
[2445] a. 100 μl RBD-PEG4-DBCO
[2446] b. 100 μl RBD-PEG4-DBCO+CaIFlour488
[2447] c. 100 μl RBD-PEG4-Azide
[2448] d. 100 μl RBD-PEG4-Azide+Alexa488 sDIBO

[2449] RBD-PEG4-DBCO+CaIFlour488 and RBD-PEG4-Azide+Alexa488 sDIBO were each made by adding 1 μl of CaIFluor488 Azide/Clicklt Alexa488 sDIBO to the RBDs. The mixture was incubated for 30 minutes, and this process was then repeated three times. RBD-PEG4-DBCO+CaIFlour488 and RBD-PEG4-Azide+Alexa488 sDIBO samples were then desalted as described. A western blot was then run to determine whether RBD labeling occurred. As shown in FIG. 30, labeling of RBD was confirmed with both DBCO and azide for future VLP conjugation. This demonstrated that a linker could be conjugated to the RBD.

[2450] To conjugate RBD to a Ring2 VLP, a fraction block of Ring2 ORF1 with a C-terminal deletion of amino acids 611-666 (pRTx-2652; corresponding to Ring2delCterm (A611-666) (7047) as described herein) in TBS was produced using SE-FPLC. Fractions were pooled and dialyzed into 2 L of PBS+0.01% poloxamer at 4° C. After 3 hours, buffer was refreshed. This was then repeated twice more and left overnight at 4° C. Approximately 30 ml of the post-SE-FPLC solution was concentrated to approximately 1.5 ml final volume. A Western blot was run to confirm that the sample was retained (FIG. 31). The next day, approximately 1.5 ml of SE-FPLC pRTx-2652 was concentrated down to 220 μl.

[2451] 1 μl NHS-PEG4-DBCO was added to 100 μl SE-FLPC pRTx-2652 samples generated as described above. The samples were then incubated for 1 hour at room temperature. 3 μl 1M Tris pH 8 was added, and the samples were desalted. RBD was labeled with NHS-PEG4-Azide by resuspending RBD in 200 μl borate buffer (0.5 mg/mL final) and 1 μl NHS-PEG4-Azide for 1 hour at room temperature. 3 μl 1M Tris pH 8 was then added and the RBD sample was desalted.

[2452] 7.5 μl of the RBD peptide was then added to 30 μl of DBCO-2652 to produce a final peptide concentration 0.1 mg/ml. The sample was then incubated at 37° C. for 2.5 hours and conjugation was assessed by Coomassie staining and Western blot with an anti-Ring2 ORF1 antibody. As shown in FIG. 32, a 90 kDa band corresponding to the conjugation of RBD (26 kDa) to pRTx-2652 anelloVLPs (˜62 kDa) was observed.

### Example 30: Ring19-eGFP Anellovector Transduces Eye Tissue In Vivo

[2453] In this example, eGFP was transduced into mouse eye tissue in vivo by subretinal injection of Ring19-eGFP Anellovector, demonstrating the utility of the anellovectors for ocular delivery of exogenous effectors in vivo.

### Methods and Materials

### Vectors:

[2454] AAV2-fCMV-eGFP was prepared by PackGene Biotech Inc. and was diluted in sterile 1×PBS. Ring19-fCMV-eGFP was prepared as described below.

### Parental Cell Culture

[2455] MOLT-4 cells were obtained from the National Cancer Institute. Cells were scaled-up and maintained in suspension culture in complete growth medium (Gibco's RPMI 1640 with 10% fetal bovine serum [FBS], supplemented with 1 mM sodium pyruvate, Pluronic F-68 [0.1%], and 2 mM L-glutamine) at 37° C. with 5% CO₂. Cells were seeded into shake flasks (2-L, flat-bottomed, Erlenmeyer flask), each with a working volume of 800 mL, at a density of 0.1 E+06 viable cells/mL and cultured in an orbital shaker (New Brunswick Innova 2100, 19-mm circular orbit) at 37° C. and 100 rpm with >85% relative humidity (RH) for 4 days.

### Transfection of MOLT-4 Cells

[2456] MOLT-4 cells were transfected with the three in-house designed plasmids (pRTx-2847; pRTx-2848; pRTx-3525) via electroporation. For electroporation at 200 mL scale, 10⁸ pelleted cells were resuspended in Opti-MEM I Reduced Serum Medium. 120 μg of the plasmids (study #1 material) and 140 μg (study #2 material) was added to the resuspended cells and electroporated using a MaxCyte STx electroporator and R-1000 electroporator assembly (MaxCyte catalog #EROO1M1-10). Electroporated cells were then transferred to a flask containing pre-warmed complete growth medium. Transfected cells were allowed to incubate at 37° C. with 5% CO₂ and harvested 72 hours post-electroporation.

### Cell Lysis

[2457] Cell pellets were resuspended in lysis buffer containing 50 mM Tris pH 8.0, 0.5% Triton-X100, 100 mM NaCl, 100× Halt protease inhibitor cocktail (Thermo Fisher Scientific catalog #78439), and 100 of mSAN nuclease (ArcticZyme catolog #NC1920045). The cell lysates were clarified by centrifugation at 12,500×g for 30 minutes at 4° C.

### Isopycnic Centrifugation

[2458] To prepare iodixanol linear gradients, 13 mL of 60% OptiPrep (Sigma-Aldrich catalog #D1556) was overlaid with 13 mL of 20% OptiPrep in 26.3-mL polycarbonate tubes, which were then spun at a 46-degree angle and a speed of 20 rpm for 16 minutes using Gradient Master (BioComp). Following the generation of the iodixanol linear gradient, 2 mL of iodixanol were removed from the top of each gradient, and 2 mL of clarified lysate was added on top of the gradient. The sample-containing tubes were spun at 347,000×g and 20° C. for 3 hours using Type 70 Ti rotor (Beckman Coulter). 1-mL fractions were collected from the top of the tubes and transferred to a 96-well 2.2 ml capacity plate. The refractive index of each fraction was measured using Refracto handheld refractometer (Mettler Toledo) to calculate density. Each fraction was then subjected to DNase-protected qPCR assay as described below.

### DNase-Protection Assay

[2459] 5 μl of each sample to be titered was incubated with 20 U of DNAse I endonuclease (Thermo Fisher Scientific catalog #18047019) in a 20 μl reaction. The reaction was incubated at 37° C. for 30 minutes. Following DNase-treatment, each sample was subjected to Proteinase K (Fisher Scientific catalog #FEREOO491) and proteinase K buffer (1% SDS, 0.1M EDTA, 0.1M Tris pH 8.0, 0.1% Pluronic F-68). The reaction was incubated at 37° C. for 30 minutes, followed by proteinase K inactivation at 95° C. for 15 minutes. 4 μl of the 1:10 diluted DNase reaction was subjected to qPCR analysis in a 20-μl reaction using TaqMan Fast Universal PCR Master Mix (Thermo Fisher Scientific catalog #44-449-63) according to the manufacturer's protocol. Primer and probe sequences are listed in Table AA1.

### Concentration of Material

[2460] Fractions of interest were determined based on the viral titer and density measurements. The pooled iodixanol fractions were then diluted 1:50 in formulation buffer (1×DPBS, 0.001% Pluronic F-68) and concentrated using Vivaspin 20 100K MWCO centrifugal filter units (Fisher Scientific catalog #1455810).

### DNase-Protection Assay on Final Material

[2461] 5 μl of the sample to be titered was incubated with 20 U of DNAse I endonuclease (Thermo Fisher Scientific catalog #18047019) in a 20 μl reaction. The reaction was incubated at 37° C. for 30 minutes. Following DNase-treatment, each sample was subjected to Proteinase K (Fisher Scientific catalog #FEREOO491) and proteinase K buffer (1% SDS, 0.1M EDTA, 0.1M Tris pH 8.0, 0.1% Pluronic F-68). The reaction was incubated at 37° C. for 30 minutes, followed by proteinase K inactivation at 95° C. for 15 minutes. 4 μl of the 1:10 diluted DNase reaction was subjected to qPCR analysis in a 20-μl reaction using TaqMan Fast Universal PCR Master Mix (Thermo Fisher Scientific catalog #44-449-63) according to the manufacturer's protocol. Primer and probe sequences are listed in Table AA1.

TABLE AA1
Primer and probes designed to quantify eGFP and WT R19

| Target | Label | Sequence (5′→3′) |
|---|---|---|
| eGFP | Forward Primer | GAACCGCATCGAGCTGAA (SEQ ID NO: |
| | | 2690) |
| | Reverse Primer | TGCTTGTCGGCCATGATATAG (SEQ ID |
| | | NO: 2691) |
| | Probe (FAM) | ATCGACTTCAAGGAGGACGGCAAC |
| | | (SEQ ID NO: 2692) |
| WT R19 | Forward Primer | GGATTTTGGGAGGGTCACTC (SEQ ID |
| | | NO: 2693) |
| | Reverse Primer | TACAGTTCCTGGACCTGTGT (SEQ ID |
| | | NO: 2694) |
| | Probe (FAM) | ACACTGGTACCCTAAAAATAGATTTCA |
| | | (SEQ ID NO: 2695) |

### Endotoxin Test on Final Material

[2462] 2.75 μl of the sample was diluted 1:40 in formulation buffer (1×DPBS, 0.001% Pluronic F-68) and the sample was subjected to the LAL detection test (Charles River) according to the manufacturer's protocol.

### SDS-PAGE and Silver Stain on Final Material

[2463] 2 μl of the sample was diluted 1:10 in formulation buffer (1×DPBS, 0.001% Pluronic F-68) and the sample was mixed 1:1 with loading dye and Bolt sample reducing agent (Thermo Fisher Scientific catalog #B0009), followed by boiling at 95° C. for 5 minutes. Proteins were separated on Bolt 4-12% Bis-Tris gel in 1× Bolt MOPS SDS running buffer (Thermo Fisher Scientific catalog #B0001). Separated proteins were stained using SilverQuest Silver Staining Kit (ThermoFisher Scientific catalog #LC6070) according to the manufacturers protocol. The developed silver stain was visualized using Chemidoc Imaging System (BioRad).

### SDS-PAGE and Coomassie Stain on Final Material

[2464] 2 μl of the sample was diluted 1:10 in formulation buffer (1×DPBS, 0.001% Pluronic F-68) and the sample was mixed 1:1 with loading dye and Bolt sample reducing agent (Thermo Fisher Scientific catalog #B0009), followed by boiling at 95° C. for 5 minutes. Proteins were separated on Bolt 4-12% Bis-Tris gel in 1× Bolt MOPS SDS running buffer (Thermo Fisher Scientific catalog #B0001). Separated proteins were washed 3 times with diH2O and incubated with Coomassie Brilliant Blue G-250 Protein Stain (Cepham Life Sciences catalog #10491). Following the stain, the gel was washed three times with diH2O. The stained gel was visualized using Chemidoc Imaging System (BioRad).

### Subretinal Injections

[2465] Mouse pupils were first dilated with one to two drops of 1% tropicamide/2.5% phenylephrine HCl (Tropi-Phen, Pine Pharmaceuticals). The mouse was subsequently anesthetized using an intraperitoneal injection of a ketamine/xylazine cocktail (Patterson Veterinary Supply, Inc.) cocktail (100/10 mg/kg). One or two drops of 0.5% proparacaine (McKesson Medical-Surgical Inc.) were applied to the eye. An incision approximately 0.5 mm in length was made with a micro scalpel 1 mm posterior to the nasal limbus. A 33-g blunt-ended needle on a 5-μl Hamilton syringe was inserted through the scleral incision, posterior to the lens, toward the temporal retina until resistance was felt. 1 μl of either 1×PBS, virus, or vector containing 0.1% of sodium fluorescein (AK-Fluor 10%, Akorn) was then injected slowly into the subretinal space. The eye was examined and the success of the subretinal injection was confirmed by visualizing the fluorescein-containing bleb through the dilated pupil with a Leica M620 TTS ophthalmic surgical microscope (Leica Microsystems, Inc.). Eyes with significant hemorrhage or leakage of vector solution from the subretinal space into the vitreous were excluded from the study. After the procedure, 0.3% tobramycin ophthalmic ointment (Tobrex, McKesson Medical-Surgical Inc.) was applied to each treated eye and the mouse was allowed to recover from the anesthesia prior to being returned to its cage in the housing room.

### Tissue Harvest for Flatmount Analysis

[2466] Mouse eyes were dissected at the 21 days following subretinal injections (n=2). After enucleation, whole eyes were placed into 4% paraformaldehyde (PFA) solution for fixation. The fixed eyes were transferred to 1×PBS after 2 hours.

[2467] The fixed eye was placed into a petri dish with 1×PBS under the Leica M80 stereomicroscope (Leica Microsystems Inc.). The cornea and lens were removed and discarded. The neural retina was separated from the posterior eye cup (PEC) and discarded. 8 radial cuts were evenly placed throughout the PEC, perpendicular to the optic nerve head. The PEC was then moved onto a glass microscope slide and arranged in a flat, even position. 1-2 drops of mounting media (ProLong Glass Antifade Mountant, Invitrogen) were dispensed over the tissue. A glass cover slip was placed over the mountant and slight pressure was applied to remove bubbles and further flatten the tissue. The slides were left for a minimum of 2 hours to cure before imaging.

### Flatmount Imaging

[2468] Once cured, images of the PEC flatmount slides were collected from each group using the EVOS M7000 microscope (Life Technologies Corporation). Images were captured in the green channel (EVOS Light Cube, GFP 2.0, Life Technologies Corporation) and the red channel (EVOS Light Cube, Texas Red 2.0, Life Technologies Corporation) at 20× magnifications, utilizing congruent exposures for each image.

### Tissue Harvest for DNA and RNA Extraction

[2469] Mouse eyes were dissected at 21 (n=8 for experiment 1 and n=8 for experiment 2) or 49 (n=8 for experiment 2) days following subretinal injections. After enucleation, the retina and PEC were separated and processed individually. These tissues were collected in 2 mL reinforced tubes (SPEX Sample Prep) containing 5 mm stainless steel beads (Qiagen, LLC) and flash-frozen immediately. They were stored at −80° C. until ready for homogenization.

### DNA Isolation

[2470] Frozen tissue samples were lysed with automated tissue homogenizer (Geno/Grinder SPEX Sample Prep) in Buffer ATL (Qiagen, USA) and proteinase K (Qiagen, USA) at 1250 rpm for two 30 second rounds. Homogenized tissues were digested on a heat block at 56 C for approximately 4 hours. Genomic DNA was precipitated with Buffer AL (Qiagen, USA) and ethanol, then isolated with Qiagen DNeasy 96 Blood & Tissue Kit. Isolated DNA was quantified using NanoDrop 8000 Spectrophotometer (Thermofisher, USA).

qPCR

[2471] Genomic DNA was assayed by qPCR on the QuantStudio 5 Real-Time PCR System (Thermo Fisher, USA) using TaqMan Gene Expression Master Mix (Thermofisher, USA). The sequence detection primers and FAM custom probes that were used in this study were synthesized by Integrated DNA Technologies, USA. eGFP sequences and wild-type (WT) Ring19 primer/probe sequences are included in Table AA1. Mouse GAPDH was used as the endogenous control in duplicates. All reactions including the DNA samples and different dilutions of a known quantity of the linearized eGFP and R19 plasmid standards were run in triplicate on the same plate. The standard curve method was used to calculate the amount of viral/vector DNA, which was normalized with the total amount of genomic DNA for each sample (quantified using nanodrop as described above).

### RNA Isolation

[2472] Frozen tissue samples were lysed with an automated tissue homogenizer (Geno/Grinder SPEX Sample Prep, USA) in QIAzol lysis reagent (Qiagen, USA) at 1250 rpm for two 30 second rounds. RNA was isolated in aqueous phase by addition of Phenol Chloroform (Thermofisher, USA) and centrifugation at 6000 rpm for 15 minutes at 4 C. The upper aqueous phase was transferred into a fresh S-block (Qiagen, USA). RNA was then precipitated with the addition of 1 volume of 70% Ethanol and isolated with the Qiagen RNeasy 96 kit. RNA concentration was quantified via Qubit RNA High Sensitivity Assay Kit (Thermofisher, USA).

### RT-qPCR

[2473] Isolated RNA was reverse transcribed into cDNA using Thermofisher SuperScript IV VILO Master Mix with ezDNase according to the manufacturer's protocol, with additional reactions included for No Reverse Transcriptase (NRT) controls. cDNA was then diluted with nuclease-free water to ensure enough volume to run all qPCR assay reactions necessary. cDNA was assayed by qPCR on the QuantStudio 5 Real-Time PCR System (Thermo Fisher, USA) using TaqMan Gene Expression Master Mix (Thermofisher, USA). The sequence detection primers and FAM custom probes that were used in this study were synthesized by Integrated DNA Technologies and can be found in Table AA1. Mouse GAPDH was used as the endogenous control in duplicates (ThermoFisher, USA). All reactions including the cDNA samples and different dilutions of a known quantity of the linearized eGFP plasmid standards were run in triplicate on the same plate. The standard curve method was used to calculate the quantities of mRNA copies and was normalized to both the no-RT signal and the total amount of RNA input into the RT reaction.

### One-Step RT-ddPCR

[2474] RNA was diluted in nuclease-free water and combined with the reagents from the One Step RT-ddPCR Advanced Kit for Probes (Bio-Rad, USA; Catalog #1864022) and eGFP primer/probe set with final primer concentrations of 900 nM and probe concentrations of 250 nM to measure transgene expression. After the RT-ddPCR reaction setup, each reaction was converted to droplets using the Automated Droplet Generator (Bio-Rad, USA) according to the manufacturer's instructions. The droplets were then subjected to endpoint PCR thermocycling with the following cycling conditions: 1 cycle of 48 C for 1 hour for reverse transcription followed by 1 cycle of 95 C for 10 mins; 40 cycles of 95 C for 30 sec, 60 C for 1 min; and 1 cycle of 98 C for 10 min and finally a 4 C hold. The cycled plate was then transferred to the QX200 Droplet Reader (Bio-Rad, USA) and analyzed using QX Manager Software (Bio-Rad, USA).

### Results

### Production and Infectivity of Ring19-eGFP Anellovector

[2475] An exemplary Cre-loxp based vector system was employed to produce Ring19-eGFP Anellovectors. FIG. 33 shows a schematic of this system. A DNase protection assay followed by qPCR was utilized to detect both Ring19-eGFP and wild type (WT) Ring19 genetic material. FIG. 34 shows a plot of DNase protected genome copies for each fraction collected for both Ring19-eGFP and WT Ring19. WT Ring19 genomes were below the limit of quantification (LOQ) in the shown fractions (FIG. 34 and FIG. 35). 12 mL of the pooled viral particles were then concentrated from 2.48×10⁸ viral genomes (vg) per mL to 200 uL at a concentration of 1.8×10¹⁰ vg per mL (FIG. 35) for use in the first subretinal injection experiment (Table AA2). 1 uL of solution was injected per eye. WT Ring19 genomes were below the LOQ by qPCR after concentration (FIG. 35). Viral proteins were run on an SDS-PAGE gel with Coomassie blue and silver staining (FIG. 36).

TABLE AA2
Experimental design for subretinal injection experiment 1 using virus batch 1

| Group | Treatment Day 0 | Dose/eye (vg) | Route (volume) | N (eyes) | Terminal Day |
|---|---|---|---|---|---|
| 1 | PBS | 0 | Subretinal (1 ul) | 10 | 21 |
| 2 | R19-fCMV-eGFP | 1.8e+7 | Subretinal (1 ul) | 10 | 21 |
| 3 | AAV2-fCMV-eGFP, dose-matched (DM) | 1.8e+7 | Subretinal (1 ul) | 10 | 21 |
| 4 | AAV2-fCMV-eGFP, high dose (HD) | 1.0e+9 | Subretinal (1 ul) | 10 | 21 |

[2476] The prepared virus was then injected into mice subretinally to target infection of eye tissue as shown in experiment 1 (Table AA2). Mice were injected with PBS, Ring19-eGFP, dose matched (DM) AAV2-eGFP, or high dose (HD) AAV2-eGFP. 21 days after injection, the posterior eye cup (PEC) and retina were collected and processed separately. Only Ring19-eGFP genomes were detected by qPCR in the PEC and the retina (FIG. 37, first page). The level of eGFP genomic DNA was significantly greater in the PEC infected with Ring19-eGFP compared to PEC infected with dose-matched AAV2-eGFP (FIG. 37, top of first page) and similar levesl of eGFP genomic DNA was detected in the retina infected with Ring10-eGFP compared to retina infected with dose-matched AAV2-eGFP (FIG. 37, bottom of first page). Further, WT Ring19 genomes were not detected by qPCR in either tissue at day 21 (FIG. 37, second page), demonstrating that viral vector genomes can be produced efficiently without WT Ring19 contamination.

[2477] FIG. 38 shows the results of the DNase protection assay for a second batch of virus used in a second subretinal injection experiment summarized in Table AA3. Similarly to batch 1, Ring19-eGFP was found at high levels in several iodixanol fractions (FIG. 38). The WT Ring19 signal observed in some of the fractions is likely due to plasmid carryover producing trace levels of WT Ring19 signal, or contamination during qPCR, since the pre- and post-concentration signals were below the LOQ after the virus preps were pooled and filtered (FIG. 39). 9 mL of the pooled virus was concentrated from 6.19×10⁸ vg per mL to 60 uL at a concentration of 2.82×10¹⁰ vg per mL (FIG. 39), then viral proteins were assessed on a coomassie blue stained SDS-PAGE gel (FIG. 40).

[2478] The subretinal injection experiment was then repeated with the second batch of virus, including tissue collection at 21 days similar to experiment 1 and extending a second collection to 49 days as outlined in Table AA3.

TABLE AA3
Experimental design for subretinal injection experiment 2 using virus batch 2

| Group | Treatment Day 0 | Dose/eye (vg) | Route (volume) | N (eyes) | Terminal Day |
|---|---|---|---|---|---|
| 1 | PBS | 0 | Subretinal (1 ul) | 8, 8 | 21, 49 |
| 2 | R19-fCMV-eGFP | 2.5e+7 | Subretinal (1 ul) | 8, 8 | 21, 49 |
| 3 | AAV2-fCMV-eGFP, dose-matched (DM) | 2.5e+7 | Subretinal (1 ul) | 8, 8 | 21, 49 |
| 4 | AAV2-fCMV-eGFP, high dose (HD) | 1.0e+9 | Subretinal (1 ul) | 8, 8 | 21, 49 |

[2479] At 21 and 49 days after injection, eye tissue was collected and assessed for the presence of Ring19-eGFP and WT Ring19 genomes using qPCR. Similarly to experiment 1, genomic eGFP was detected in PEC infected by Ring19-eGFP both 21 and 49 days after injection, and continued to persist at greater levels than in the PEC that were infected with dose-matched AAV2-eGFP (FIG. 41). FIG. 42 shows that genomic eGFP likewise persisted in the retina at both 21 and 49 days after injection. This contrasted with WT Ring19, which was not detected in the PEC at 21 or 49 days post injection (FIG. 43) or in the retina at 21 or 49 days post injection (FIG. 44).

Subretinal Injection of Ring19-eGFP Induces eGFP mRNA Expression in the Retina and PEC

[2480] To characterize whether Ring19-eGFP infection can induce eGFP expression in eye tissue, RNA was collected from PEC and retina tissue separately from Experiment 1 (Table AA2) at 21 days after infection (n=5 eyes per group). RT-qPCR targeted to eGFP was then conducted. eGFP mRNA was detected in both the PEC and the retina 21 days after infection by Ring19-eGFP (FIG. 45). eGFP mRNA was also detected in the dose matched and high dose AAV2-eGFP groups, while no eGFP mRNA was detected in the PBS control group (FIG. 45). The presence of eGFP mRNA was confirmed by one-step RT-ddPCR in both the PEC and the retina (FIG. 46), indicating that subretinal injection of Ring19-eGFP successfully transduced eGFP into eye tissue.

[2481] RNA was also collected from Experiment 2 (Table AA3) at 21 days and also extended to a 49 day post injection group. At 21 days after injection, eGFP mRNA was again detected in the PEC and retina in all three experimental groups but not in the PBS treated negative control by both RT-qPCR and RT-ddPCR (FIG. 47). This replicated the data from the previous experiment and showed that eGFP was successfully transduced by Ring19-eGFP. At 49 days post transduction, eGFP mRNA was detected in the PEC by both RT-qPCR and RT-ddPCR (FIG. 48), showing lasting transduction. eGFP mRNA was detected by RT-ddPCR at day 49 in the retina as well but at lower levels than at Day 21 and in the PEC (FIG. 49).

Subretinal Injection of Ring19-eGFP Results in eGFP Protein Expression in the PEC

[2482] Next, whether functional eGFP protein can be produced after Ring19-eGFP infection was examined. The PEC was collected at day 21 from Experiment 1 for fixation and flatmount imaging (n=2 eyes per group). To determine true eGFP expression, representative sections of the tissue were imaged in both the eGFP and Texas red channels. Overlapping these channels showed that any area where only eGFP signal was detected showed true eGFP expression, while any signal that overlapped between the eGFP and Texas red channels was caused by red blood cell autofluorescence. eGFP positive cells in the Ring-19eGFP group as well as the AAV2-eGFP dose matched and high dose groups were found using this imaging technique (FIG. 50; see arrows). As expected, there were no eGFP positive cells in the PBS treated negative control group (FIG. 50). These data showed that subretinal injection of Ring19-eGFP resulted in expression of functional eGFP protein in the PEC.

### Example 31: Expression of GFP Protein in Human RPE Cells after Transduction with Engineered Ring19 Anellovector

[2483] This example describes the transduction of in vitro human retinal pigment epithelial (RPE) cells using engineered Ring19-eGFP anellovector.

### Methods and Materials

### Viral Vector Production

[2484] Ring19-eGFP: MOLT-4 cells were transfected with the three in-house designed plasmids (pRTx-2847; pRTx-2848; pRTx-3525; sequences as listed in Tables Z1, Z5, and W1 above) and Ring19-eGFP anellovectors were purified, obtaining a titer of 2.6×10⁹ vg/ml. Virus particle production was verified using TEM imaging (FIG. 51).

[2485] AAV2-eGFP was obtained from PackGene Biotech, Inc. with a titer of 1×10¹³ vg/ml.

### Human Retinal Pigment Epithelial Cell Culture

[2486] Human RPE cells were obtained from Fujifilm Cellular Dynamics Inc. Cells were thawed and plated in Vitronectin-coated plates and maintained in 91.3% MEM alpha (ThermoFisher), 5% KnockOut SR (ThermoFisher), 1% N-2 Supplement, 55 nM hydrocortisone (Sigma), 250 ug/ml taurine (Sigma), 14 pg/ml triiodo-L-thyronine (T₃) (Sigma), and optional 25 ug/ml gentamicin (ThermoFisher) for 5 days to confluence (FIG. 52).

### Transduction of RPE Cells

[2487] RPE cells were transduced on the 5th day of culture using either AAV2-eGFP or Ring19-eGFP at an MOI of approximately 800 (2.6×10⁸ virus particles per 3.2×10⁵ cells). Untreated cells were used as the negative control. The maintenance media was changed on the next day. Cells were cultured for 15 days after transduction with media changes twice per week.

### RPE Fixation and Immunostaining

[2488] On the 20th day after thawing, or 15 days after transduction, RPE cells were fixed for immunostaining. RPE were fixed in 4% Paraformaldehyde at room temperature for 20 minutes followed by three washes with 1×DPBS. RPE were then stored in DPBS containing 0.05% sodium Azide at 4C until immunostaining. For immunostaining, fixed RPE cells were permeabilized for 30 minutes at room temperature in a solution of 0.3% Triton X-100, 10% serum, and 5% BSA. Cells were then incubated in a solution containing the primary antibody against ZO-1 (ZO1-1Å12, Alexa Fluor 488, from Invitrogen) used at 1:500 dilution or against GFP (from Abcam) at a dilution of 1:500 in 5% BSA in DPBS overnight at 4 C. Cells were then washed with DPBS three times before application of the goat anti-chicken IgY (H+L) cross-adsorbed secondary antibody, Alexa Fluor Plus 647 (Invitrogen) at a dilution of 1:500 in 5% BSA in DPBS with the addition of Hoechst at a dilution of 1:1000-2000. Cells were incubated in this solution for 2 hours at room temperature, then washed with DPBS three times. 0.05% sodium azide in DPBS was added to each well before imaging.

### Imaging of Live and Fixed RPE Cells

[2489] The cells were washed after staining and imaged at room temperature. The imaging was performed using a Zeiss fluorescence microscope (AXIO) and confocal microscope (LSM 900). The images were taken at 20× and 40× magnification. On confocal, the images were taken as a Z-stake. All the images were processed using Fiji (ImageJ) software from the NIH. Different channels were used to image GFP or Alexa Fluor 488 (green), Cy5 (far red), and UV channel in blue for Hoechst (nuclear imaging), along with phase.

### Results

[2490] Ring19-eGFP transduction induces GFP protein expression in human RPE cells To determine if Ring19 is able to transduce expression of eGFP in human eye cells, Ring19 virus particles carrying an eGFP expression vector were first produced (Ring19-eGFP). AAV2 virus particles carrying an eGFP expression vector were utilized as a positive control (AAV2-eGFP). Human RPE cells were cultured to confluence as shown in FIG. 51. RPE cells produced melanin granules and formed tight junctions by the 28th day of culture, indicating successful culture of RPEs (FIG. 53 and FIG. 54). Mature RPEs also expressed VEGF protein as expected, as determined by an ELISA assay against VEGF (FIG. 55). Ring19-eGFP or AAV2-eGFP were then used to infect the RPE cell cultures. Live cells imaged 14 days after infection showed eGFP protein expression in cells infected by Ring19-eGFP (FIG. 56) and AAV2-eGFP (FIG. 57), indicating successful transduction of eGFP by Ring19-eGFP.

[2491] Next, the RPE cells were fixed 15 days after infection for further characterization of induced eGFP protein expression. Fixed cells were immunostained using an antibody against eGFP and imaged for both eGFP protein expression and eGFP protein immunostaining. RPE cells infected with Ring19-eGFP showed eGFP protein expression concurrent with immunostaining for eGFP (FIG. 58 and FIG. 59), as did cells infected with AAV2-eGFP (FIG. 60 and FIG. 61). No eGFP protein expression or eGFP immunostaining signal was detected in untreated cells (FIG. 62). Together, these data demonstrate that a Ring19 anellovector can successfully transduce eGFP to human RPE cells in vitro, demonstrating the utility of anellovectors for ocular delivery of exogenous effectors to human cells.

### Example 32. Transduction of Ocular Tissue with Varying Doses of Ring19-eGFP

[2492] This example describes the administration of different dosage levels of Ring19-eGFP anellovector to ocular tissue and the corresponding dose response. Ring19-eGFP was administered at two different doses, here termed high dose (HD) and low dose (LD).

### Preparation of Viral Particles

[2493] AAV2-fCMV-eGFP was prepared by Packgene Biotech Inc. and diluted in sterile 1×PBS. Ring19-fCMV-eGFP was prepared as described in Example 30.

### Subretinal Injection of Various Dose Levels of Viral Particles and Analysis

[2494] Ring19-eGFP and AAV2-eGFP particles were subretinally injected into mice at the dose described in Table AA4 below, according to the method described in Example 30.

[2495] All analytical methods were performed according to the methods described in Example 30.

TABLE AA4
Experimental design

| | | | Dose | | | | |
|---|---|---|---|---|---|---|---|
| | | | Vector | Dose/eye | | N | Terminal |
| Group | Strain | Treatment Day 0 | (vg/ml) | (vg) | Route | (eyes) | Day |
| 1 | C57BL/6J | PBS | 0 | 0 | SR | 12 | 21 |
| | | | | | (1 ul) | | |
| 2 | C57BL/6J | R19-fCMV-eGFP | 1.2e+10 | 1.2e+7 | SR | 12 | 21 |
| | | (LD) | | | (1 ul) | | |
| 3 | C57BL/6J | R19-fCMV-eGFP | 1.2e+11 | 1.2e+8 | SR | 12 | 21 |
| | | (HD) | | | (1 ul) | | |
| 4 | C57BL/6J | AAV2-fCMV-eGFP | 1.2e+10 | 1.2e+7 | SR | 12 | 21 |
| | | (LD) | | | (1 ul) | | |
| 5 | C57BL/6J | AAV2-fCMV-eGFP | 1.2e+11 | 1.2e+8 | SR | 12 | 21 |
| | | (HD) | | | (1 ul) | | |

[2496] 21 days after injection, DNA from the posterior eye cup (PEC) and retina were collected and processed separately. eGFP genomes were detected by qPCR in the PEC and the retina (FIGS. 63A and 63B). The level of eGFP genomic DNA increased in a doses-dependent manner in the PEC and retina for both Ring19-eGFP and AAV2-eGFP. Furthermore, the eGFP genomes detected were significantly greater in the PEC infected with Ring19-eGFP compared to PEC infected with dose-matched AAV2-eGFP at both the low dose and high dose (FIG. 63A). A very low level of WT Ring19 genome was detected in the PEC infected with Ring19-eGFP (HD) (FIG. 63C) but no WT Ring19 genome was detected in the Ring19-eGFP (LD) or in the retina (FIG. 63D).

[2497] To characterize whether Ring19-eGFP infection can induce eGFP expression in eye tissue, RNA was collected from PEC and retina tissue separately at 21 days after transduction (n=5 eyes per group). RT-qPCR targeted to eGFP was then conducted. eGFP mRNA was detected in a dose-dependent manner in the PEC 21 days after transduction by LD and HD Ring19-eGFP (FIG. 64A). eGFP mRNA was also detected in the dose matched AAV2-eGFP groups, while no eGFP mRNA was detected in the PBS control group (FIG. 64A). The presence of eGFP mRNA was confirmed by one-step RT-ddPCR in the PEC (FIG. 64B). eGFP mRNA was below the limit of detection in the retina transduced with LD and HD Ring19-eGFP (FIG. 64C) but eGFP mRNA was detected by one-step RT-ddPCR in the retina transduced with HD Ring19-eGFP (FIG. 64D).

[2498] Next, whether functional eGFP protein can be produced after Ring19-eGFP transduction was examined. The PEC was collected at day 21 for fixation and flatmount imaging (n=3 eyes per group). To determine true eGFP expression, representative sections of the tissue were imaged in both the eGFP and Texas red channels. Overlapping these channels showed that any area where only eGFP signal was detected showed true eGFP expression, while any signal that overlapped between the eGFP and Texas red channels was caused by red blood cell autofluorescence. eGFP positive cells in the LD and HD Ring19-eGFP groups as well as in the LD and HD AAV2-eGFP dose matched groups were found using this imaging technique (FIG. 65; see arrows). Moreover, greater number of eGFP positive cells were detected in the HD Ring19-eGFP group compared to the LD Ring-19-eGFP group. As expected, there were no eGFP positive cells in the PBS treated negative control group (FIG. 65). These data showed that subretinal injection of Ring19-eGFP resulted in expression of functional eGFP protein in the PEC.

[2499] Together, these data show that more eGFP genomes, more eGFP transcripts, and more eGFP-positive cells could be delivered and expressed in eye tissue with higher doses of the Ring19 anellovector and in a dose-dependent manner.

### Example 33. A Cre Recombinase Based Three-Plasmid System for Anelloviridae Family Vector Particle Production

[2500] In this example, a site specific recombinase, such as Cre, is used to control the site of recombination of a genetic element construct by specific placement of recombinase recognition sites (e.g., loxP sites) flanking the sequence of the genetic element. An exemplary genetic element construct includes non-coding regions of an Anelloviridae family viral genome, which contain the elements required for DNA replication and packaging, as well as a transgene cassette (e.g., including a promoter, transgene, and terminator elements). By flanking this cassette with recombinase recognition sites, the recombination event can be used to produce double-stranded DNA minicircles consisting of the excised genetic element sequence (FIG. 66). The minicircle can then be converted to single-stranded circular DNA, which can undergo rolling circle replication mediated by Anelloviridae family proteins and/or be packaged into particles as described herein.

[2501] In this example, producer cells are transfected in a 3-plasmid system comprising: (1) a first plasmid comprising recombinase recognition sites (e.g. loxp) flanking an expression cassette with the non-coding region (NCR) of an Anelloviridae family virus followed by a promoter, transgene, and terminator element, (2) an expression plasmid that provides the recombinase (e.g. Cre), and (3) a self-replicating rescue (SRR) plasmid or another rescue plasmid variant that contains Anelloviridae family viral proteins to drive replication and packaging of the circular genetic elements (FIG. 67). Experiments demonstrating the use of the three-plasmid system using Cre recombinase and loxp recognition sites specifically are provided below.

[2502] In one experiment, two experimental groups were tested. In one, only the vector plasmid was transfected into cells. In the second, all three plasmids (vector plasmid, Cre recombinase expression plasmid, and SRR plasmid) were transfected into cells together. qPCR was performed on particles produced to quantify genome copies of WT Ring19 versus eGFP. The three-plasmid transfection produced more Ring19-eGFP genome copies than the vector alone transfection, and the WT Ring19 genome copies remained at below the lower limit of quantification (LLOQ) (FIG. 68). This demonstrates that the three-plasmid recombinase system is effective at producing Ring19-eGFP particles with no detectable WT Ring19 contamination.

[2503] To further characterize the three-plasmid system, cells were transfected with the three plasmids in varying molar ratios. The molar ratio of the vector plasmid and the Cre recombinase plasmid were kept constant with varying amounts of the SRR plasmid. The ratios tested included 1:1:2, 1:1:1.75, 1:1:1.5, 1:1:1.25, 1:1:1, 1:1:0.75, 1:1:0.5 (vector:cre:SRR). In this experiment, the 1:1:1.25 ratio produced the highest quantity of particles with Ring19-eGFP genomes (FIG. 69).

### Example 34. A Bxb1 Recombinase Based Three-Plasmid System for Anellovector Viral Particle Production

[2504] In this example, an exemplary three-plasmid recombinase system utilizing Bxb1 is used to produce minicircles comprising Anelloviridae family vector genetic element sequences. Bxb1 provides, in some instances, reduced toxicity in human cells, high recombination efficiency in human cells, unidirectional recombinase function, and limited recognition sequences in the human genome. In this system, producer cells are transfected with 3 plasmids: (1) a first plasmid comprising recombinase recognition sites (attP and attB sites) flanking an expression cassette comprising the non-coding region (NCR) of an Anelloviridae family virus, a promoter, a transgene, and a terminator element, (2) an expression plasmid that encodes Bxb1 recombinase, and (3) a self-replicating rescue (SRR) plasmid that encodes Anelloviridae family viral proteins to drive replication and packaging of the circular genomic elements (FIG. 70).

[2505] To demonstrate the three-plasmid system using Bxb1, the following plasmids were prepared: a vector plasmid with Bxb1 recognition sites flanking a UBC driven eGFP expression cassette (pBox), a Bxb1 expression plasmid, and an SRR with Ring19 ORF proteins. Two variants of the pBox plasmid were made, each containing a single point mutation between the Cap site and 5′ conserved UTR in the Ring19 NCR to remove an Esp31 restriction enzyme site for cloning purposes. pBoxl remained unmutated. pBox2 contains an A to T mutation at nucleotide 2839 of Table N25 or nucleotide 200 of Table N26.1, and a G to C mutation at nucleotide 2838 of Table N25 or nucleotide 199 of Table N26.1 of the Ring19 genome sequence.

[2506] In one experiment, recombination and transgene expression efficiency of the Bxb1 and Cre recombinase-based systems were tested. MOLT-4 cells were transfected with either: the pFlox vector with CMV as the eGFP transgene promoter or the pBox vectors (pBoxl, pBox2, and pBox3) with UbC as the eGFP transgene promoter, alone or together with a Ring19 self-replicating rescue plasmid (SRR) and a Cre or Bxb1-expressing plasmid. Cells were imaged for eGFP protein expression four days after transfection. Cells transfected with pFlox and the Ring19 SRR, and any of the pBox variants with the Ring19 SRR, exhibited expression of eGFP, but not when pFlox or pBox alone were transfected (FIG. 71). These results demonstrated that the recombinase system, using either Cre or Bxb1 recombinase, resulted in successful expression of transgene in producer cells.

[2507] Transfected MOLT-4 cells were harvested, lysed, and viral particles were purified through an iodixanol linear gradient. Following DNAse I digestion and proteinase K digestion, genome copies of eGFP or WT Ring19 was quantified by qPCR. Based on two replicates, the four groups that included transfection of an SRR plasmid and a recombinase-expressing plasmid showed higher numbers of eGFP genomes than the pFlox or pBox alone groups, and the WT Ring19 levels were at or below the LLOQ (FIG. 72).

[2508] Together, these data show that the recombinase systems described herein can effectively produce Ring19-eGFP over WT Ring19 genetic elements. These genetic elements were also DNase-protected, showing successful packaging into particles.

[2509] Without wishing to be bound by theory, it is contemplated that other site-specific recombinases having specific recognition sites can be utilized in the recombinase systems described herein. Non-limiting examples of such site-specific recombinases and their corresponding recognition sites are listed in Table V1 herein.

### Example 35. Different Promoters can Drive Transgene Expression in the Cre and Bxb1 Recombinase Systems

[2510] In this example, the use of several different promoters to drive expression of the vector transgene in both the Cre and Bxb1 recombinase three-plasmid systems was tested. Universal promoters fCMV, sCAG, CBA, and CBH were inserted into the vector transgene while keeping the transgene itself, eGFP, constant (FIG. 73A). MOLT-4 cells were transfected with either the Cre or the Bxb1 recombinase three-plasmid systems with a Ring19 self-replicating rescue (SRR) plasmid and the resulting virus particles were isolated after 4 days, lysed, and purified through an iodixaol linear gradient as described herein. A DNase-protection assay was performed on the isolated viral material, and qPCR was used to detect the number of viral Ring19-eGFP genomes per liter of cell culture.

[2511] Based on two replicates, payload-matched Cre and Bxb1 three-plasmid systems yielded comparable quantities of Ring19-eGFP viral genomes when using the same transgene promoter (FIG. 73B). Both the Cre and Bxb1 systems also performed comparably across different transgene promoters (FIG. 73B). These data show that the Cre and Bxb1 three-plasmid systems yielded similar amounts of vector genomes, and that different promoters can be used within both systems. These data also indicate that tissue-specific promoters can be utilized to tailor transgene expression to specific target tissues of interest.

### Example 36. Enhancing Vector Production Using Alternative Origins of Replication

[2512] This example describes insertion of different origins of replication, such as an origin of replication derived from AAV, PCV, or SV40 viruses, into Anelloviridae family vector genetic element plasmids, e.g., to alter or enhance production of Anelloviridae family vector particles. FIG. 74 depicts the use of an exemplary plasmid containing a transgene cassette with an alternative origin of replication, flanked by recombinase sites, in combination with an SRR plasmid and, in this example, a plasmid encoding the replication initiator proteins for the selected origin of replication. When co-transfected into a cell expressing a recombinase (either by transfecting a plasmid encoding a recombinase or stably producing a recombinase), these plasmids can be used to produce Anelloviridae family vector particles. The origin of replication can be selected and/or optimized for maximal production of particles.

### Example 37. A Recombinase Based Two-Plasmid System for Anelloviridae Family Vector Particle Production

[2513] This example describes an exemplary Cre recombinase-based system that utilizes two plasmids instead of three. In this system, the cassette encoding the recombinase is incorporated onto the vector plasmid, resulting in a 2-plasmid system comprising the vector plasmid, which comprises both the genetic element sequence and the recombinase expression cassette, and an SRR plasmid as described herein (FIG. 75). This method ensures that the ratio of recombinase DNA sequence to genetic element sequence is 1:1. Bxb1 recombinase can also be utilized in a similar two-plasmid system (FIG. 76), as can other site-specific recombinases with specific associated recognition sites (e.g., as described herein).

[2514] In on example, MOLT-4 cells are transfected with the two plasmids of the system, and Anelloviridae family vector particles carrying genetic elements are isolated and purified as described previously herein. A DNase-protection assay can be used to quantify the production of packaged particles, and qPCR for vector specific DNA and WT Ring DNA can be used to determine the amount of vectorized particles produced relative to WT viral particles. It is contemplated that an increase in the vector specific Ring genomes over WT Ring genomes would indicate that the two-plasmid system preferentially produces packaged vector genetic elements.

### Example 38. Isolation of cssDNA Using Nicking Enzymes and Exonuclease Digest

[2515] The genomes of Anelloviridae family viruses consist of circular single stranded DNA (cssDNA). This example describes the use of nicking enzymes and digestion with an exonuclease to produce cssDNA from a double-stranded DNA molecule, such as a minicircle as described herein. Minicircles can also be produced via the recombinase-based methods and constructs described herein (e.g., via site-specific recombination of a vector plasmid comprising a genetic element sequence flanked by recombinase recognition sites).

[2516] Once a minicircle has been produced, it can be converted to cssDNA. In one example, the minicircle may be first nicked on one strand using a nicking enzyme such as the Nt.BsmAI enzyme. The nicked strand is then digested by an exonuclease (e.g. T7 exonuclease), leaving the other strand intact. Gel electrophoresis may be used to analyze the untreated, nicked, and nicked and exonuclease treated DNA. A southern blot may also be performed on a gel with probes to detect the antisense and the sense strand of the DNA. After completion of both nicking and exonuclease digestion, only the antisense strand of the DNA is detected. This demonstrates that the combination of nicking and exonuclease digestion successfully isolates the antisense strand of the starting DNA as a circular single stranded DNA molecule.

[2517] The minicircle may be designed such that it comprises one or more nicking sites (FIG. 78). In an embodiment, the minicircle may comprise 1, 2, 3, 4, 5, or more nicking sites that are optimally spaced. The minicircle may be incubated with a nicking enzyme (e.g., Nt.BbvCI (New England Biolabs)), which nicks the sense strand of the plasmid at the 1, 2, 3, 4, 5, or more nicking sites. An exonuclease, such as T7 exonuclease, is used to digest the nicked strand, leaving the antisense strand intact as a cssDNA (FIG. 78). The cssDNA is then physically separated from the debris of the nicked strand and can be isolated and purified as shown in FIG. 78.

### Example 39. Isolation of cssDNA from a Ring19-eGFP Minicircle Using Nicking Enzymes and Exonuclease Digest

[2518] This example demonstrates the isolation of cssDNA from a double stranded minicircle by selective nicking of the positive-sense strand of the minicircle, digesting the nicked strand with an exonuclease, and isolating the negative strand cssDNA by phenol:choloroform extraction and ethanol precipitation.

Selective nicking of positive-sense strand

[2519] Minicircle pRTx-3929_MC as shown in Table Y4 was incubated with at least 1 U of the nicking enzyme Nt·BbvCl per μg of DNA as shown in Table 38A1.

TABLE 38A1

| Component | Volume (μl) |
|---|---|
| pRTx-3929_MC (5000 μg) | 1498.8 |
| 10x rCutSmart ™ Buffer (NE Biolabs) | 500 |
| Nt.BbvCl (10 U/μl) | 550 |
| Water | 451.2 |
| Total | 3000 |

[2520] The above mixture was incubated at 37° C. for 2.5 hours.

### Exonuclease Digest of Nicked Strand

[2521] The nicking reaction mixture was then directly incubated with T7 exonuclease (at least 1 μl per μg of DNA) as shown in Table 38A2.

TABLE 38A2

| Component | Volume (μl) |
|---|---|
| Nicking reaction mixture | 1500 |
| T7 exonuclease | 2500 |
| 10x rCutSmart ™ Buffer (NE Biolabs) | 1250 |
| Water | 8750 |
| Total | 14000 |

[2522] The above mixture was incubated at 25° C. (about room temperature) for 30 minutes. The reaction was stopped by adding EDTA to 11 mM. The concentration of the DNA was 178.6 ng/μl.

Isolation of the Negative-Strand cssDNA

[2523] One volume of a phenol:chloroform solution was added to the exonuclease-digested mixture and vortexed vigorously for 1 minute. The tube was centrifuged for 5 minutes and the aqueous phase was aspirated from the top of the solution and transferred to a new clean tube.

[2524] 1/10^{th} volume of 3M sodium acetate solution was added to the aspirated nucleic acid sample, followed by 1 volume of 99% isopropanol. The mixture was centrifuged for 30 minutes at 4° C. at 12,000×g. The supernatant was aspirated or decanted, retaining the pellet. The pellet was rinsed with cold 70% ethanol and centrifuged for 5-15 minutes at 4° C. at 12,000×g. The supernatant was aspirated or decanted, retaining the pellet. The pellet was allowed to airdry and then dissolved in water. The concentration of the cssDNA was 1619.6 ng/μl.

[2525] FIG. 84 shows a gel with a 1 kb plus DNA ladder (lane 1), untreated DNA (400 ng) (lane 2), nicked DNA (400 ng) (lane 3), nicked and exonuclease-treated unpurified DNA (1 μg) (lane 4), and nicked and exonuclease-treated purified DNA (1 μg) (lane 5). As shown in lane 5, the purified cssDNA showed the expected banding pattern (shown with an arrow).

### Example 40. Isolation of cssDNA from a Ring2-eGFP Minicircle Using Nicking Enzymes and Exonuclease Digest

[2526] This example demonstrates the isolation of cssDNA from a double stranded minicircle by selective nicking of the positive-sense strand of the minicircle, digesting the nicked strand with an exonuclease, and isolating the negative strand cssDNA by phenol:choloroform extraction and ethanol precipitation.

### Selective Nicking of Positive-Sense Strand

[2527] Minicircle pRTx-3928_MC as shown in Table Y2 was incubated with at least 1 U of the nicking enzyme Nt·BbvCl per μg of DNA as shown in Table 38B3.

TABLE 38B3

| Component | Volume (μl) |
|---|---|
| pRTx-3928_MC (12000 μg) | 6141 |
| 10x rCutSmart ™ Buffer (NE Biolabs) | 850 |
| Nt.BbvCl (10 U/μl) | 1320 |
| Water | 189 |
| Total | 8500 |

[2528] The above mixture was incubated at 37° C. for 2.5 hours.

### Exonuclease Digest of Nicked Strand

[2529] The nicking reaction mixture was then directly incubated with T7 exonuclease (at least 1 μl per μg of DNA) as shown in Table 38B4.

TABLE 38B4

| Component | Volume (μl) |
|---|---|
| Nicking reaction mixture | 2833.3 |
| T7 exonuclease | 4000 |
| 10x rCutSmart ™ Buffer (NE Biolabs) | 1716.7 |
| Water | 11450 |
| Total | 20000 |

[2530] The above mixture was incubated at 25° C. (about room temperature) for 30 minutes. The reaction was stopped by adding EDTA to 11 mM. The concentration of the DNA was 50 ng/μl.

Isolation of the Negative-Strand cssDNA

[2531] One volume of a phenol:chloroform solution was added to the exonuclease-digested mixture and vortexed vigorously for 1 minute. The tube was centrifuged for 5 minutes and the aqueous phase was aspirated from the top of the solution and transferred to a new clean tube.

[2532] 1/10^{th} volume of 3M sodium acetate solution was added to the aspirated nucleic acid sample, followed by 1 volume of 99% isopropanol. The mixture was centrifuged for 30 minutes at 4° C. at 12,000×g. The supernatant was aspirated or decanted, retaining the pellet. The pellet was rinsed with cold 70% ethanol and centrifuged for 5-15 minutes at 4° C. at 12,000×g. The supernatant was aspirated or decanted, retaining the pellet. The pellet was allowed to airdry and then dissolved in water. The concentration of the cssDNA was 1638.6 ng/μl.

[2533] FIG. 85 shows a gel with a 1 kb plus DNA ladder (lane 1), untreated DNA (lane 2), nicked DNA (lane 3), nicked and exonuclease-treated unpurified DNA (lane 4), and nicked and exonuclease-treated purified DNA (lane 5), all loaded with 500 ng of DNA. As shown in lane 5, the purified cssDNA showed the expected banding pattern (shown with an arrow).

### Example 41. Production of Minicircles in Bacterial Cells Using a Recombinase System

[2534] This example describes the generation of double-stranded DNA minicircles comprising the genetic element sequence of an Anelloviridae family vector in bacteria using a site-specific recombinase, e.g., PhiC31. As shown in FIG. 79, a first plasmid comprising the genetic element sequence, flanked with recombinase recognition sites, e.g. attB and attP, is transformed into a bacterial cell such as E. coli. In one example, the bacterial cell is also transformed with a plasmid comprising an expression cassette for a site-specific recombinase (e.g., PhiC31) capable of recognizing the recognition sites in the vector plasmid. The recombinase is expressed and initiates site-specific recombination in the first plasmid. This results in the production of a minicircle comprising the genetic element sequence and a circular DNA molecule containing the excised vector backbone. In another instance, a bacterial cell that stably expresses a recombinase such as PhiC31 is transformed with a vector plasmid comprising the genetic element sequence, flanked with recombinase recognition sites, e.g. attB and attP. This can also produce minicircles containing the genetic element sequence. Minicircle produced in bacterial cells as described above can, in some instances, be isolated from the bacteria and can then be used for any of the applications described herein.

[2535] In one example, minicircles comprising the genetic element sequence of an Anelloviridae family vector were produced in bacterial cells as described above. Minicircle DNA was then isolated from the bacteria at 0, 30, 60, 90, or 120 minutes post-minicircle induction using standard miniprep methods and linearized with Xbal (FIG. 80). The expected parental plasmid length was 7146 bp, circularized backbone length 4078 bp, and minicircle length 3068 bp. As shown in FIG. 80, minicircle DNA was successfully isolated at 30-120 minutes post-induction.

### Example 42. Use of Minicircles for Production of Anelloviridae Family Vector Particles

[2536] This example describes the use of minicircles comprising genetic element sequences (e.g., produced as described above) for production of Anelloviridae family vector particles (see FIG. 79).

[2537] In some instances, the minicircles can be used to make particles in vitro (e.g., outside of a cell, e.g., in a cell-free system as described herein). In one example, the minicircles are produced in and then isolated from bacterial cells as described above. The isolated minicircles are then converted to cssDNA, for example, using any method described herein (e.g., by nicking and digesting one stand of the minicircle as described herein). The resultant cssDNAs can then be contacted with ORF1 molecules from a suitable Anelloviridae family virus and packaged into capsids comprising the ORF1 molecules, thereby producing particles.

[2538] In some instances, the minicircles can be used to make particles in mammalian cells, e.g., MOLT-4 cells (see also FIG. 77). In one example, minicircles are transfected or virally transduced into MOLT-4 cells. A plasmid (e.g., a self-replicating rescue (SRR) plasmid) encoding ORF proteins from an Anelloviridae family virus (and, in some instances, and a SV Large T antigen expression cassette) are also introduced into the cells. The minicircle is then converted to cssDNA in the cell and then packaged by the capsid proteins expressed from the SRR to produce particles. The particles can be isolated and purified by any of the methods described herein.

### Example 43. Removing Homology Between the Vector and SRR Plasmids Reduces Production of Wild-Type (WT) Anelloviridae Family Viral Genomes

[2539] This example describes the modification of a self-replicating rescue (SRR) plasmid to improve the yield of Anelloviridae family vector genetic elements over wild-type (WT) Anelloviridae family viral genomes. In brief, a version of the SRR plasmid that removes an intron from the anellovirus NCR but retains the remainder of the NCR and the native kozak sequence, and a version of the SRR plasmid that only includes a native kozak sequence and does not contain any other portion of the Anelloviridae family viral NCR were created. These versions of the SRR plasmid remove most or all other homology between the SRR and the vector plasmid, thereby reducing or preventing homologous recombination that might otherwise lead to reconstitution of wild type viral genomes. As an example, SRR plasmid pRTx-3696 has the intron in the Ring19 NCR deleted but retains the remainder of the NCR and the native kozak sequence (see Table WX5). SRR plasmid pRTx-3856 contains the native kozak sequence but does not contain any other portion of the Ring19 NCR. Both versions of the SRR were able to produce DNAse-protected anellovectors without producing detectable wild type anellovirus.

### Materials and Methods

[2540] MOLT-4 cells were transfected with the plasmids as shown in Table 41X via electroporation.

TABLE 41X
Plasmids used to transfect MOLT-4 cells

| Condition | | |
|---|---|---|
| # | Description | Plasmid(s) |
| 1 | Vector alone | pRTx-2847 (genetic element |
| | | construct encoding eGFP, |
| | | Table Z1, SEQ ID NO: 2618) |
| 2 | Vector + R19ORF1KO | pRTx-2847 (genetic element |
| | | construct encoding eGFP) |
| | | pRTx-2848 (iCre-encoding |
| | | plasmid, Table Z5, SEQ ID |
| | | NO: 2622) |
| | | pRTx-3775 (R19 SRR with |
| | | ORF1 expression knocked out |
| | | by a premature stop codon in |
| | | the ORF1 coding sequence, |
| | | Table WX6, SEQ ID NO: 2006) |
| 3 | Vector + R19 SRR | pRTx-2847 (Table Z1) |
| | | pRTx-2848 (Table Z5) |
| | | pRTx-3525 (Table W1, SEQ ID |
| | | NO: 2000) |
| 4 | Vector + R19 | pRTx-2847 (Table Z1) |
| | Δintron 1 SRR | pRTx-2848 (Table Z5) |
| | | pRTx-3696 (Table WX5, SEQ ID |
| | | NO: 2005) |
| 5 | Vector + | pRTx-2847 (Table Z1) |
| | R19Δexon1Δintron1 | pRTx-2848 (Table Z5) |
| | SRR | pRTx-3856 (Table W2, SEQ ID |
| | | NO: 2002) |

[2541] Three days after transfection, cells were harvested and pelleted. Each pellet was resuspended with lysis mastermix (0.25% Triton X-100, 25 mM Tris pH 8.0, 150 mM NaCl, 2 mM MgCl2, 2× Proteinase inhibitor cocktail (Thermo Fisher Scientific catalog #78439), and 200 U of mSAN nuclease (ArticZymes AS catalog #70950-150)). The lysates were incubated at 37° C., shaking, for 1 hour. The lysates were clarified by centrifuging at 10,000×g for 20 minutes. The clarified lysates were transferred to new tubes without disturbing the pellet and stored at −80° C.

[2542] To prepare iodixanol linear gradients, 13 mL of 60% OptiPrep (Sigma-Aldrich catalog #D1556) was overlaid with 13 mL of 20% OptiPrep in 26.3-mL polycarbonate tubes, which were then spun at a 46-degree angle and a speed of 20 rpm for 16 minutes using Gradient Master (BioComp). Following the generation of the iodixanol linear gradient, 2 mL of iodixanol were removed from the top of each gradient, and 2 mL of thawed clarified lysate was added on top of the gradient. The sample-containing tubes were spun at 60,000 rpm and 20° C. for 1 hour using Type 70 Ti rotor (Beckman Coulter). 1-mL fractions were collected from the top of the tubes and transferred to a 96-well plate. The first 8 mL were pooled and discarded. 2 mL fractions were then collected and stored in a deep 96-well plate. 60 μl aliquots were dispensed into two working plates and stored at −80° C.

[2543] The plates were thawed and spun down. 5 μl of each sample was incubated with 20 U of DNAse I endonuclease (Thermo Fisher Scientific catalog #18047019) in a 20 μl reaction. The reaction was incubated at 37° C. for 30 minutes. Following DNase-treatment, each sample was subjected to Proteinase K (Fisher Scientific catalog #FEREOO491) and proteinase K buffer (1% SDS, 0.1M EDTA, 0.1M Tris pH 8.0, 0.1% Pluronic F-68). The reaction was incubated at 55° C. for 30 minutes, followed by proteinase K inactivation at 95° C. for 15 minutes and then held at 4° C. 4 μl of the 1:10 diluted DNase reaction was subjected to qPCR analysis in a 20-μl reaction using TaqMan™ Fast Advanced Master Mix (Thermo Fisher Scientific catalog #44-449-63) according to the manufacturer's protocol. Primer and probe sequences are listed in Table AA1.

### Results

[2544] As shown in FIG. 86, no DNAse protected eGFP-encoding genomes were produced from cells transfected only with the genetic element construct encoding eGFP (“vector alone”; condition 1) or with the genetic element construct encoding eGFP, iCre-encoding plasmid, and an SRR with ORF1 expression knocked out (“vector+R19-ORF1KO”; condition 2) as expected. Also as expected, cells transfected with the genetic element construct encoding eGFP, iCre-encoding plasmid, and an intact Ring19 SRR (“vector+R19 SRR”; condition 3) produced DNAse protected eGFP-encoding genomes. Cells transfected with the genetic element construct encoding eGFP, iCre-encoding plasmid and either the SRR with the intron in the Ring19 NCR deleted but retaining the remainder of the NCR and the native kozak sequence (“vector+R19Δintron1 SRR”; condition 4) or the SRR with the native kozak sequence but lacking all other Ring19 NCR (“vector+R19Δexon1Δintron1 SRR”; condition 5) were also capable of producing DNAse protected eGFP-encoding genomes. WT Ring19 genomes were below the limit of quantification (LOQ) in all samples (FIG. 86).

### Example 44. Self-Replicating Rescue (SRR) Plasmid Configurations

[2545] This example describes a series of exemplary configurations of cassettes that may be included in the self-replicating rescue (SRR) plasmid for use in the recombinase systems and methods described herein. Generally, the SRR contains at least one cassette comprising a promoter upstream of coding sequences for Anelloviridae family ORF1, ORF2, and ORF3 molecules (FIG. 81). In some instances, this cassette may also include an IRES sequence downstream of the Anelloviridae ORF coding region, which is in turn followed by an SV Large T antigen and an SV40 origin of replication driven by the same promoter as the Anelloviridae family ORFs (FIG. 81). In some instances, the SV Large T antigen and SV40 origin of replication are instead part of a separate cassette, with their expression driven by a separate promoter (FIG. 82). Such SRR plasmids can, in some instances, further include one or more additional cassettes. For example, as shown in FIGS. 81 and 82, SRR plasmids can include a separate cassette encoding an Anelloviridae family ORF1 molecule. Such SRR plasmids can, in certain instances, include a silencing mutation (e.g., a nonsense mutation, deletion, insertion, or frameshift mutation) in the ORF1 coding sequence of the cassette encoding the ORF1, ORF2, and ORF3 molecules. In other instances, the ORF1 coding sequence of the cassette encoding the ORF1, ORF2, and ORF3 molecules is intact (e.g., capable of expressing a functional ORF1 molecule). SRR plasmids can, in some instances, also include a separate cassette encoding a site-specific recombinase.

[2546] FIG. 83 summarizes how the cassettes of an SRR plasmid can be mixed and matched combinatorially. For example, an SRR plasmid may comprise 1, 2, 3, 4, or even more separate expression cassettes, in any order, provided that the SRRs contain at least one cassette expressing an SV40 Large T antigen and SV40 origin of replication, either through eg. IRES or as a standalone cassette expressed from a promoter. In some instances, a full ORF cassette may be included. In other instances, the cassette encoding the ORF1, ORF2, and ORF3 molecules comprises a mutant Anelloviridae family vector ORF sequence (for example, ORF1 with a silencing mutation, e.g., a premature stop codon), and a separate expression cassette expressing the ORF, e.g. ORF1, may be included. The SRR plasmid may also include additional cassettes, such as a cassette encoding a single Anelloviridae family vector ORF (e.g., an ORF1 molecule) instead of including all three, or a cassette encoding another transgene, such as a site-specific recombinase. The orientation of individual cassettes can be the same or different depending on the desired function. For example, all of the cassettes in a given SRR plasmid may be in the same orientation. Alternatively, one or more of the cassettes may be in the opposite orientation relative to other cassettes in the SRR plasmid.

### Example 45. Knocking Out Expression of ORF1 in the Self-Replicating Rescue (SRR) Plasmid does not Affect Expression of Other ORF Proteins and Splice Variants

[2547] This experiment shows that knocking out the expression of ORF1 in the SRR plasmid by adding a premature stop codon in the coding sequence of ORF1 does not affect the expression of other ORF proteins and splice variants from the SRR plasmid.

[2548] The Ring19 SRR, pRTx-3525, expresses all of the Ring19 ORF proteins, including ORF1, ORF2, ORF3, ORF1/1, ORF2/2, and ORF2/3 (see Table Z8). pRTx-3775 plasmid is the same as pRTx-3525, except that it contains two internal stop codons (TAA) in the Ring19 ORF1 coding sequence (see Table WX6). The stop codons were placed within the ORF1 coding sequence such that it would not affect the expression of ORF1/1 and other splice variants (see Table 43X). pRTx-4534 plasmid expresses only the Ring19 ORF1/1 in an SRR backbone (see Tables WX7 and 43X).

[2549] The Ring2 SRR, pRTx-3853, expresses all of the Ring2 ORF proteins, including ORF1, ORF2, ORF3, ORF1/1, ORF2/2, and ORF2/3 (see Table W3). pRTx-3776 plasmid is the same as pRTx-3853, except that it contains two internal stop codons (TAA) in the Ring2 ORF1 coding sequence (see Table WX8). The stop codons were placed within the ORF1 coding sequence such that it would not affect the expression of ORF1/1 and other splice variants (see Table 43X). pRTx-4463 plasmid expresses only the Ring2 ORF1/1 in an SRR backbone (see Tables WX9 and 43X).

TABLE 43X
Relevant ORF amino acid sequences in the SRR variants. * indicates stop codon.

Ring19 ORF1 sequence in pRTx-3775 plasmid
MPWYPRRRYPRRRYRWLRRWRARRPFRPRYRRRYWVRNYSRKRKL**ITTKEWQPKVIRKTHV
KGTYPLFLCTKHRINNNMIQYLDSIAPEHYYGGGGFSIMQFSLQALYEEFIKAKNWWTNTNCFLPLV
RYMGCSFKFYKTEFYDYIVLIERCYPLACTDEMYLSTQPSIMMLTRKCIFVPCKQNSKGKKPYKKVRV
RPPSQMTTGWHFSQDLANMPLVVLKTSVCSFDRYYTDSTAKSTTIGFKTLNTQTFRYHDWQEPPTTG
YKPQNLLWFYGAENGSPVDPNNTIVSNLIYLGGTGPYEKGTPIKTNISNYFSEPKLWGNIFHDDYTSG
TSPVFVTNKSPSEIKTAWNTIKDLTVKASGVFTLRTIPLWLPCRYNPFADKATNNKIWLVSIHSDHTEW
KPIDNPLLQRTDLPLWLLVWGWQDWQKKNQQTSQPDINYLTVISSPYISCYPKLDYYVLLDEGFWE
GHSTYIESITDSDKKHWYPKNRFQIETLNLIANTGPGTVKLRENQAAEGHMVYRFNFKLGGCPAPME
KICDPSKQSKYPIPNNQQQTTSLQSPENPIQTYLYDFDERRGLLTERATKRIKQDHTSEKTVLPFTGA
ATDLPILQTTSQEESSSEEEEEQQAEKKLLQLRRKQHRLRERILQLLDIQNT* (SEQ ID NO: 2776 and
SEQ ID NO: 2696, respectively)
Ring19 ORF1/1 sequence in pRTx-4534 plasmid
MPWYPRRRYPRRRYRWLRRWRARRPFRPRYRRRYWSPENPIQTYLYDFDERRGLLTERATKRI
KQDHTSEKTVLPFTGAATDLPILQTTSQEESSSEEEEEQQAEKKLLQLRRKQHRLRERILQLLDI
QNT* (SEQ ID NO: 2697)
Ring2 ORF1 sequence in pRTx-3776
MPYYYRRRRYNYRRPRWYGRGWIRRPFRRRFRRKRRVRPTYTTIPLKQWQPP**RTCYIKGQD
CLIYYSNLRLGMNSTMYEKSIVPVHWPGGGSFSVSMLTLDALYDIHKLCRNWWTSTNQDLPLVRYKG
CKITFYQSTFTDYIVRIHTELPANSNKLTYPNTHPLMMMMSKYKHIIPSRQTRRKKKPYTKIFVKPPPQ
FENKWYFATDLYKIPLLQIHCTACNLQNPFVKPDKLSNNVTLWSLNTISIQNRNMSVDQGQSWPFKIL
GTQSFYFYFYTGANLPGDTTQIPVADLLPLTNPRINRPGQSLNEAKITDHITFTEYKNKFTNYWGNPF
NKHIQEHLDMILYSLKSPEAIKNEWTTENMKWNQLNNAGTMALTPFNEPIFTQIQYNPDRDTGEDT
QLYLLSNATGTGWDPPGIPELILEGFPLWLIYWGFADFQKNLKKVTNIDTNYMLVAKTKFTQKPGTF
YLVILNDTFVEGNSPYEKQPLPEDNIKWYPQVQYQLEAQNKLLQTGPFTPNIQGQLSDNISMFYKFY
FKWGGSPPKAINVENPAHQIQYPIPRNEHETTSLQSPGEAPESILYSFDYRHGNYTTTALSRISQDWAL
KDTVSKITEPDRQQLLKQALECLQISEETQEKKEKEVQQLISNLRQQQQLYRERIISLLKDQ* (SEQ
ID NO: 2777 and SEQ ID NO: 2698, respectively)
Ring2 ORF1/1 sequence in pRTx-4463
MPYYYRRRRYNYRRPRWYGRGWIRRPFRRRFRRKRRIQYPIPRNEHETTSLQSPGEAPESILYS
FDYRHGNYTTTALSRISQDWALKDTVSKITEPDRQQLLKQALECLQISEETQEKKEKEVQQLIS
NLRQQQQLYRERIISLLKDQ* (SEQ ID NO: 59)
*indicates amino acid position corresponding to stop codon
Italicized portion is not expected to be translated

[2550] These plasmids were transfected into Expi293 cells and expression of the various ORF proteins were tested.

### Materials and Methods

[2551] Expi293 cells were transfected using PEIpro® (Polyplus (Sartorius)) with the plasmids and volumes used as shown in Table 43XX:

TABLE 43XX

| | Concentration | Plasmid Volume |
|---|---|---|
| Plasmid | (ng/μL) | Used (μL) |
| pRTx-3525 (Ring19 full SRR) | 1000 | 30 |
| pRTx-3775 (Ring19 w/ORF1 KO) | 1000 | 30 |
| pRTx-4534 (Ring19 ORF1/1 SRR) | 1000 | 30 |
| pRTx-3853 (Ring2 full SRR) | 2000 | 15 |
| pRTx-3776 (Ring2 w/ORF1 KO) | 1000 | 30 |
| pRTx-4463 (Ring2 ORF1/1 SRR) | 1000 | 30 |

[2552] In one tube (Tube A), 500 μL of Opti-MEM™ media (ThermoFisher) and the plasmid amounts shown in Table 43XX were mixed. In another tube (Tube B), 500 μL of Opti-MEM media and 90 μL of PEIpro® were mixed. Tubes A and B were each vortexed and incubated at room temperature for 10 minutes. The contents of Tube B was added into Tube A and vortexed. The mixture was incubated at room temperature for 20 minutes. The mixture was then added to 30 mL of Expi293 cells at a density of 1 E+06 cells/mL in a shake flask. The cells were incubated at 37° C. shaking for three days and then harvested for Western blot analysis. Anti-Ring19 ORF1, anti-Ring19 ORF2, anti-Ring2 ORF1, and anti-Ring2 ORF2 antibodies were used to visualize the respective proteins.

### Results

[2553] FIG. 87A shows a Western blot probed with an anti-Ring19 ORF1 antibody. As expected, the intact Ring19 SRR (pRTx-3525; “Ring19 full SRR”) expressed ORF1 and ORF1/1 (lane 2). The Ring19 SRR with the ORF1 expression knockout (pRTx-3775; “Ring19 ORF1 KO”) did not express the full-length ORF1 but did express ORF1/1 (lane 3). The Ring19 SRR expressing only ORF1/1 (pRTx-4534; “Ring19 ORF1/1”) showed only ORF1/1 and no full-length ORF1 expression (lane 4).

[2554] FIG. 87B shows a Western blot probed with an anti-Ring19 ORF2 antibody. As expected, the intact Ring19 SRR (pRTx-3525; “Ring19 full SRR”) expressed ORF2, ORF2/2, and ORF2/3 (lane 2). Similarly, the Ring19 SRR with the ORF1 expression knockout (pRTx-3775; “Ring19 ORF1 KO”) expressed ORF2, ORF2/2, and ORF2/3 (lane 3). Also as expected, the Ring19 SRR expressing only ORF1/1 (pRTx-4534; “Ring19 ORF1/1”) did not show expression of any of ORF2, ORF2/2, or ORF2/3 (lane 4).

[2555] FIG. 87C shows a Western blot probed with an anti-Ring2 ORF1 antibody. As expected, the intact Ring2 SRR (pRTx-3853; “Ring2 full SRR”) expressed ORF1 and ORF1/1 (lane 2). The Ring2 SRR with the ORF1 expression knockout (pRTx-3776; “Ring2 ORF1 KO”) did not express the full-length ORF1 but did express ORF1/1 (lane 3). The Ring2 SRR expressing only ORF1/1 (pRTx-4463; “Ring2 ORF1/1”) showed only ORF1/1 and no full-length ORF1 expression (lane 4).

[2556] FIG. 87D shows a Western blot probed with an anti-Ring2 ORF2 antibody. As expected, the intact Ring2 SRR (pRTx-3853; “Ring2 full SRR”) expressed ORF2, ORF2/2, and ORF2/3 (lane 2). Similarly, the Ring2 SRR with the ORF1 expression knockout (pRTx-3776; “Ring2 ORF1 KO”) expressed ORF2, ORF2/2, and ORF2/3 (lane 3). Also as expected, the Ring2 SRR expressing only ORF1/1 (pRTx-4463; “Ring2 ORF1/1”) did not show expression of any of ORF2, ORF2/2, or ORF2/3 (lane 4).

[2557] These results confirm that knocking out the expression of ORF1 in the SRR does not affect the expression of other ORF proteins and splice variants.

### Example 46. The Ring19 Genetic Element is Successfully Packaged by Other Ring ORF1 Molecules

[2558] This Example demonstrates that Ring ORF1 molecules of one Anellovector can package the genetic element of a second Anellovector.

### Materials and Methods

### Plasmids

### Genetic Element Construct Plasmid

[2559] The Ring19 genetic element construct, pRTX-2847, was designed with lox66 and lox 71 sites flanking a RING19 non-coding region (NCR) and a CMV::egfp::WPRE::bGH-pA payload cassette. The sequence for the construct is provided below.

TABLE Z1
Exemplary floxed Ring19 vector plasmid
for three-plasmid systems (pRTx-2847)

| | |
|---|---|
| Name | pRTx-2847 |
| Type | Plasmid |
| Description | pLox-Ring19ΔORF::fCMV_EGFP_{—} |
| | WPRE_bGH-pA-Rand100. |
| Length | 5452 bp |

(SEQ ID NO: 2699)
Annotations:

| Region/Element | Base range |
|---|---|
| Lox71 (loxP site) | 432-465 |
| GC-rich region | 529-640 |
| Initiator element | 813-828 |
| 5′ UTR conserved domain | 880-950 |
| Intron 1 | 892-979 |
| Full CMV promoter | 1004-1573 |
| Inert 5′ UTR | 1585-1619 |
| eGFP coding sequence | 1620-2339 |
| WPRE | 2343-2934 |
| bGHpA terminator sequence | 2939-3166 |
| 100 bp random stuffer sequence | 3167-3266 |
| Lox66 (loxP site) | 3271-3304 |
| LacI repressor binding site (complement) | 3384-3406 |
| Lac operon operator (lacO) | 3386-3402 |
| Lac operon promoter (complement) | 3410-3440 |
| C-tag | 3418-3429 |
| E coli catabolite activator protein | 3455-3476 |
| binding site (complement) | |
| Origin of replication (pUC origin) | 3705-4378 |
| (complement) | |
| Kanamycin resistance (KanR) CDS | 4530-5339 |
| (complement) | |

### Self-Replicating Rescue (SRR) Plasmid Expressing Anellovirus ORF1

[2560] Anelloviral ORF1 was expressed from a self-replicating rescue (SRR) plasmid. Table X lists each of the SRR plasmids used for the expression of various Anelloviral ORF1.

TABLE X
Self-replicating rescue plasmids used to
produce cross-packaged Anellovectors.

| Plasmid | Anellovirus ORF1 |
|---|---|
| pRTx-3525 | Ring19 |
| pRTx-3853 | Ring2 |
| pRTx-3861 | Ring25 |
| pRTx-3905 | Ring9 |
| pRTx-3906 | Ring34 |
| pRTx-4177 | RING10 |
| pRTx-4185 | RING161 |
| pRTx-4192 | YYBYFW |

### Cre Expression Plasmid

[2561] pRTX-2848 expresses iCre from the CMV promoter. The sequence of this construct is provided below.

TABLE Z5
Exemplary Cre recombinase expression plasmid (pRTx-2848)

| | |
|---|---|
| Name | pRTx-2848 |
| Type | Plasmid |
| Description | CMV_iCre_pcDNA3.1(+). |
| Length | 6473 bp |

(SEQ ID NO: 2700)
Annotations:

| Region/Element | Base range |
|---|---|
| CMV enhancer | 235-614 |
| CMV promoter | 615-818 |
| T7 RNA polymerase promoter | 863-880 |
| iCre coding sequence | 964-2019 |
| bGHpA terminator sequence | 2070-2293 |
| Origin of replication | 2962-3097 |
| SV40 polyA sequence | 4146-4267 |
| Lac operon operator (lacO) | 4340-4356 |
| Lac operon promoter (complement) | 4364-4394 |
| C-tag | 4372-4383 |
| Catabolite activator protein binding site | 4409-4430 |
| Origin of replication (complement) | 4718-5306 |
| Ampicillin resistance gene promoter | 6338-6442 |
| (complement) | |

### Cross Packaged Anellovector Production

[2562] Anellovectors were produced in MOLT4 cells by triple electroporation of a genetic element construct plasmid, a Cre expression plasmid, and an SRR plasmid. Transfected cultures were harvested on day 3 post-electroporation, pelleted by centrifugation, and incubated in a M-SAN/Triton X-100 lysis buffer. Cell lysates were loaded onto an iodixanol linear gradient for separation of vector particles, taking fractions around the expected density of Anelloviruses. Packaged vector genomes were titered from collected fractions by DNase digestion to remove any unencapsidated DNA, and quantitated by qPCR against eGFP. Controls included MOLT4 cells transfected with Ring19 genetic element construct (pRTX-2847) alone and MOLT4 cells transfected with Ring19 genetic element construct (pRTX-2847), Ring19 SRR (pRTx-3525), and pRTx-2848 (Cre expression vector).

### Results

[2563] As shown in FIG. 88, ORF1 from Ring19, Ring2, Ring9, Ring25, Ring161, YYBYFW, and Ring 34 were capable of cross packaging a Ring19 genetic element and producing Anellovectors at levels greater than when cells were transfected with a Ring19 genetic element construct alone. FIG. 89 also shows that ORF1 from Ring10 was capable of cross packaging a Ring19 genetic element and producing Anellovectors at levels greater than when cells were transfected with Ring19 genetic element construct alone. These studies demonstrate that Anelloviral ORF1 proteins from one Anellovirus are capable of packaging a genetic element from a different Anellovirus.

### Example 47: In Vivo Transduction of Cross-Packaged R2 ORF1 and Ring19 Genetic Element Anellovector

[2564] This example demonstrates in vivo transduction using a cross-packaged Anellovector.

### Materials & Methods

### Vectors:

[2565] AAV2-fCMV-eGFP is an adeno-associated virus based on the plasmid pRTx-2770 with a payload comprising from the 5′ to 3′ direction an AAV2 ITR, Ring2 5′ NCR, CMV promoter, eGFP, SV40 pA, Ring2 3′ NCR, and AAV2 ITR (Table Z6). AAV2-fCMV-eGFP was prepared by Packgene Biotech Inc. and was diluted in sterile 1×PBS.

[2566] Ring2-fCMV-eGFP (an Anellovector with Ring2 ORF1 encapsulating Ring19-eGFP genetic element) and Ring19-fCMV-eGFP (an Anellovector with Ring19 ORF1 encapsulating Ring19-eGFP genetic element) were prepared as described below.

TABLE Z6
pRTx-2770

| | |
|---|---|
| Name | pRTx-2770 |
| Type | Plasmid |
| Length | 5128 bp |

(SEQ ID NO: 2701)
Annotations:

| Region/Element | Base range |
|---|---|
| E. coli CAP protein binding site | 130 . . . 151 |
| Lac operon promoter | 166 . . . 196 |
| LacI repressor protein binding site | 204 . . . 220 |
| AAV2 inverted terminal repeat | 269 . . . 409 |
| Ring2 5′NCR | 421 . . . 844 |
| CMV enhancer | 881 . . . 1260 |
| Full CMV promoter | 896 . . . 1465 |
| CMV promoter | 1261 . . . 1464 |
| Inert 5′ UTR | 1477 . . . 1507 |
| Kozak sequence | 1506 . . . 1515 |
| eGFP coding sequence | 1512 . . . 2231 |
| SV40 poly(A) sequence | 2262 . . . 2383 |
| Ring2 3′NCR | 2411 . . . 2575 |
| AAV2 inverted terminal repeat | 2589 . . . 2729 |
| AmpR promoter | 3246 . . . 3350 |
| Beta lactamase ampicillin resistance coding sequence | 3351 . . . 4211 |
| Gigh-copy-number ColE1/pMB1/pBR322/pUC origin | 4382 . . . 4970 |
| of replication | |

Exemplary eGFP Amino Acid Sequence (e.g., Encoded by the Nucleotides 1512-2231 of Table Z6):

(SEQ ID NO: 2650)
MVSKGEELFTGVVPILVELDGDVNGHKFSVSGEGEGDATYGKLTLKFIC
TTGKLPVPWPTLVTTLTYGVQCFSRYPDHMKQHDFFKSAMPEGYVQERT
IFFKDDGNYKTRAEVKFEGDTLVNRIELKGIDFKEDGNILGHKLEYNYN
SHNVYIMADKQKNGIKVNFKIRHNIEDGSVQLADHYQQNTPIGDGPVLL
PDNHYLSTQSALSKDPNEKRDHMVLLEFVTAAGITLGMDELYK

### Exemplary Beta Lactamase Amino Acid Sequence (e.g., Encoded by of Nucleotides 3351-4211 of Table Z6):

(SEQ ID NO: 2702)
MSIQHFRVALIPFFAAFCLPVFAHPETLVKVKDAEDQLGARVGYIELDL
NSGKILESFRPEERFPMMSTFKVLLCGAVLSRIDAGQEQLGRRIHYSQN
DLVEYSPVTEKHLTDGMTVRELCSAAITMSDNTAANLLLTTIGGPKELT
AFLHNMGDHVTRLDRWEPELNEAIPNDERDTTMPVAMATTLRKLLTGEL
LTLASRQQLIDWMEADKVAGPLLRSALPAGWFIADKSGAGERGSRGIIA
ALGPDGKPSRIVVIYTTGSQATMDERNRQIAEIGASLIKHW

### Parental Cell Culture

[2568] MOLT-4 cells were obtained from the National Cancer Institute. Cells were scaled-up and maintained in suspension culture in complete growth medium (Gibco's RPMI 1640 with 10% fetal bovine serum [FBS], supplemented with 1 mM sodium pyruvate, Pluronic F-68 [0.1%], and 2 mM L-glutamine) at 37° C. with 5% CO₂. Cells were seeded into shake flasks (2-L, flat-bottomed, Erlenmeyer flask), each with a working volume of 800 mL, at a density of 0.1 E+06 viable cells/mL and cultured in an orbital shaker (New Brunswick Innova 2100, 19-mm circular orbit) at 37° C. and 90 rpm with >85% relative humidity (RH) for 4 days.

### Transfection of MOLT-4 Cells

[2569] Each viral vector was produced using a distinct combination of three plasmids, via electroporation into MOLT-4 cells. MOLT-4 cells were transfected via electroporation with the plasmids shown in Table E0:

TABLE E0
Plasmids used to produce an Anellovector with Ring19
ORF1 encapsulating a Ring19 genetic element (R19-
eGFP) and an Anellovector with Ring2 ORF1 encapsulating
a Ring19 genetic element (R2-eGFP).

| Anellovector | Plasmids |
|---|---|
| Ring19-fCMV-eGFP (“R19-eGFP”) | pRTx-2847 (R19-eGFP vector) |
| | pRTx-2848 (iCre plasmid) |
| | pRTx-3525 (R19 SRR) |
| Ring2-fCMV-eGFP (“R2-eGFP”) | pRTx-2847 (R19-eGFP vector) |
| | pRTx-2848 (iCre plasmid) |
| | pRTx-3853 (R2 SRR) |

[2570] For each of the viral vector production culture preps, 5 E+08 MOLT-4 cells were pelleted and resuspended in Opti-MEM I Reduced Serum Medium. 800 μg of the plasmids were added to each of the resuspended cells and electroporated using a MaxCyte STx electroporator and CL1.1 electroporator assemblies (MaxCyte catalog #SCL1). Each batch of electroporated cells were then transferred to separate flasks containing pre-warmed complete growth medium. Transfected cells were allowed to incubate at 37° C. with 5% CO₂ and harvested via centrifugation 72 hours post-electroporation.

### Cell Lysis

[2571] Cell pellets were resuspended in lysis buffer containing 50 mM Tris pH 8.0, 0.5% Triton-X100, 100 mM NaCl, 100× Halt protease inhibitor cocktail (Thermo Fisher Scientific catalog #78439), and 200 U of mSAN nuclease (ArcticZyme catolog #NC1920045). The cell lysates were clarified by centrifugation at 12,500×g for 30 minutes at 4° C.

### Isopycnic Centrifugation

[2572] To prepare iodixanol linear gradients, 13 mL of 60% OptiPrep (Sigma-Aldrich catalog #D1556) was overlayed with 13 mL of 20% OptiPrep in 26.3-mL polycarbonate tubes, which were then spun at a 46-degree angle and a speed of 20 rpm for 16 minutes using Gradient Master (BioComp). Following the generation of the iodixanol linear gradient, 2 mL of iodixanol were removed from the top of each gradient, and 2 mL of clarified lysate was added on top of the gradient. The sample-containing tubes were spun at 347,000×g and 20° C. for 3 hours using Type 70 Ti rotor (Beckman Coulter). 1-mL fractions were collected from the top of the tubes and transferred to a 96-well 2.2 ml capacity plate. Each fraction was then subjected to a DNase-protected qPCR assay as described below.

### DNase-Protection Assay

[2573] 5 μl of each sample to be titered was incubated with 20 U of DNAse I endonuclease (Thermo Fisher Scientific catalog #18047019) in a 20 μl reaction. The reaction was incubated at 37° C. for 30 minutes. Following DNase-treatment, each sample was subjected to Proteinase K (Fisher Scientific catalog #FEREOO491) and proteinase K buffer (1% SDS, 0.1M EDTA, 0.1M Tris pH 8.0, 0.1% Pluronic F-68). The reaction was incubated at 37° C. for 30 minutes, followed by proteinase K inactivation at 95° C. for 15 minutes. 4 μl of the 1:10 diluted DNase reaction was subjected to qPCR analysis in a 20-μl reaction using TaqMan Fast Universal PCR Master Mix (Thermo Fisher Scientific catalog #44-449-63) according to the manufacturer's protocol. Primer and probe sequences are listed in Table E10. FIG. 90 shows the post-Iodixanol DNase-Protection Assay of Ring19_fCMV_eGFP and Ring2_fCMV_eGFP Material.

### Concentration of Material

[2574] Fractions of interest were determined based on the viral titer. The pooled iodixanol fractions were then diluted 1:50 in formulation buffer (1×DPBS, 0.001% Pluronic F-68) and concentrated using Vivaspin 20 100K MWCO centrifugal filter units (Fisher Scientific catalog #1455810).

### DNase-Protection Assay on Final Material

[2575] 5 μl of the sample to be titered was incubated with 20 U of DNAse I endonuclease (Thermo Fisher Scientific catalog #18047019) in a 20-μl reaction. The reaction was incubated at 37° C. for 30 minutes. Following DNase-treatment, each sample was subjected to Proteinase K (Fisher Scientific catalog #FERE00491) and proteinase K buffer (1% SDS, 0.1M EDTA, 0.1M Tris pH 8.0, 0.1% Pluronic F-68). The reaction was incubated at 37° C. for 30 minutes, followed by proteinase K inactivation at 95° C. for 15 minutes. 4 μl of the 1:10 diluted DNase reaction was subjected to qPCR analysis in a 20-μl reaction using TaqMan Fast Universal PCR Master Mix (Thermo Fisher Scientific catalog #44-449-63) according to the manufacturer's protocol. Primer and probe sequences are listed in Table E10. FIG. 91 shows the pre- and Post-Concentration DNase-Protection Assay of Ring19_fCMV_eGFP and Ring2_fCMV_eGFP Material.

### Endotoxin Test on Final Material

[2576] 2.241 of the sample was diluted 1:50 in formulation buffer (1×DPBS, 0.001% Pluronic F-68) and the sample was subjected to the LAL detection test (Charles River) according to the manufacturer's protocol.

### SDS-PAGE and Coomassie Stain on Final Material

[2577] 2 μl of the sample was diluted 1:10 in formulation buffer (1×DPBS, 0.001% Pluronic F-68) and the sample was mixed 1:1 with loading dye and Bolt sample reducing agent (Thermo Fisher Scientific catalog #B0009), followed by boiling at 95° C. for 10 minutes. Proteins were separated on Bolt 4-12% Bis-Tris gel in 1× Bolt MOPS SDS running buffer (Thermo Fisher Scientific catalog #B0001). Separated proteins were stained using InstantBlue Coomassie Protein Stain (ABCAM catalog #ab119211) according to the manufacturers protocol. Following the stain, the gel was washed three times with diH2O. The stained gel was visualized using Chemidoc Imaging System (BioRad) as shown in FIG. 92 and FIG. 93.

### Bicinchonic Acid Assay (BCA)

[2578] 2 μl of the sample was diluted 1:10 in formulation buffer (1×DPBS, 0.001% Pluronic F-68) and the sample was subjected to the Pierce BCA Protein Assay Kit (ThermoScientific catalogue #23227) according to the manufacturer's protocol.

### Care and Use of Animals.

[2579] All mouse studies were approved and governed by the Ring Therapeutics Institutional Animal Care and Use Committee. Female C57Bl/6J mice 9-12 weeks of age were obtained from Jackson Laboratories for use in these studies.

### Subretinal Injections

[2580] Pupils were first dilated with one to two drops of 1% tropicamide/2.5% phenylephrine HCl (Tropi-Phen, Pine Pharmaceuticals). The mouse was subsequently anesthetized using an intraperitoneal injection of a ketamine/xylazine cocktail (100/10 mg/kg) (Patterson Veterinary Supply, Inc.). One or two drops of 0.5% proparacaine (McKesson Medical-Surgical Inc.) were applied to the eye. An incision approximately 0.5 mm in length was made with a micro scalpel 1 mm posterior to the nasal limbus. A 33-g blunt-ended needle on a 5-μl Hamilton syringe was inserted through the scleral incision, posterior to the lens, toward the temporal retina until resistance was felt. 1 μl of either 1×PBS, virus, or vector containing 0.1% of sodium fluorescein (AK-Fluor 10%, Akorn) was then injected slowly into the subretinal space. The eye was examined and the success of the subretinal injection was confirmed by visualizing the fluorescein-containing bleb through the dilated pupil with a Leica M620 TTS ophthalmic surgical microscope (Leica Microsystems, Inc.). Eyes with significant hemorrhage or leakage of vector solution from the subretinal space into the vitreous were excluded from the study. After the procedure, 0.3% tobramycin ophthalmic ointment (Tobrex, McKesson Medical-Surgical Inc.) was applied to each treated eye and the mouse was allowed to recover from the anesthesia prior to being returned to its cage in the housing room.

### Tissue Harvest for Flatmount Analysis

[2581] Mouse eyes were dissected at the indicated time point following subretinal injections (n=2 for the given timepoint). After enucleation, whole eyes were placed into 4% paraformaldehyde (PFA) solution for fixation. The fixed eyes were transferred to 1×PBS, after 2 hours.

[2582] The fixed eye was placed into a petri dish with 1×PBS under the Leica M80 stereomicroscope (Leica Microsystems Inc.). The cornea and lens were removed and discarded. The neural retina was separated from the posterior eye cup (PEC) and discarded. 8 radial cuts were evenly placed throughout the PEC, perpendicular to the optic nerve head. The PEC was then moved onto a glass microscope slide and arranged in a flat, even position. 1-2 drops of mounting media (ProLong Glass Antifade Mountant, Invitrogen) were dispensed over the tissue. A glass cover slip was placed over the mountant and slight pressure was applied to remove bubbles and further flatten the tissue. The slides were left for a minimum of 2 hours to cure before imaging.

### Flatmount Imaging

[2583] Once cured, images of the PEC flatmount slides were collected from each group using the EVOS M7000 microscope (Life Technologies Corporation). Images were captured in the green channel (EVOS Light Cube, GFP 2.0, Life Technologies Corporation) and the red channel (EVOS Light Cube, Texas Red 2.0, Life Technologies Corporation) at 20× magnifications, utilizing congruent exposures for each image.

### Tissue Harvest for DNA and RNA Extraction

[2584] Mouse eyes were dissected at indicated time points following subretinal injections (n=8 for the given timepoint). After enucleation, the retina and posterior eyecup (PEC) were separated and processed individually. These tissues were collected in 2 mL reinforced tubes (SPEX Sample Prep) containing 5 mm stainless steel beads (Qiagen, LLC) and flash-frozen immediately. They were stored at −80° C. until homogenization.

### DNA Isolation

[2585] Frozen tissue samples were lysed with an automated tissue homogenizer (Geno/Grinder SPEX Sample Prep) in Buffer ATL (Qiagen, USA) and proteinase K (Qiagen, USA) at 1250 rpm for two 30 second rounds. Homogenized tissues were digested on heat block at 56C for about 4 hours. Genomic DNA was precipitated with Buffer AL (Qiagen, USA) and Ethanol, then isolated with Qiagen DNeasy 96 Blood & Tissue Kit. Isolated DNA was quantified using NanoDrop 8000 Spectrophotometer (Thermofisher, USA).

qPCR

[2586] Genomic DNA was assayed by qPCR on the QuantStudio 5—Real-Time PCR System (Thermo Fisher, USA) using TaqMan Gene Expression Master Mix (Thermofisher, USA). The sequence detection primers and FAM custom probes that were used in this study were synthesized by Integrated DNA Technologies, USA. eGFP, wild-type Ring2 and wild-type Ring19 primer/probe sequences are in Table E10.

[2587] All reactions including the DNA samples and different dilutions of a known quantity of the linearized eGFP and R19 plasmid standards were run in triplicate on the same plate. The standard curve method was used to calculate the amount of viral/vector DNA, which was normalized with the total amount of genomic DNA for each sample (quantified using a nanodrop as described above).

### RNA Isolation

[2588] Frozen tissue samples were lysed with an automated tissue homogenizer (Geno/Grinder SPEX Sample Prep, USA) in QIAzol lysis reagent (Qiagen, USA) at 1250 rpm for two 30 second rounds. RNA was then isolated in aqueous phase by the addition of Phenol Chloroform (Thermofisher, USA) and centrifugation at 6000 rpm for 15 minutes at 4 C. The upper aqueous phase was transferred into a fresh S-block (Qiagen, USA). RNA was precipitated with the addition of one volume of 70% Ethanol and isolated with the Qiagen RNeasy 96 kit. RNA concentration was then quantified via Qubit RNA High Sensitivity Assay Kit (Thermofisher, USA).

### RT-qPCR

[2589] RNA was reverse transcribed into cDNA using Thermofisher SuperScript IV VILO Master Mix with ezDNase according to manufacturer's protocol with additional reactions included for No Reverse Transcriptase (NRT) controls. cDNA was diluted with nuclease-free water to ensure enough volume to run all qPCR assay reactions necessary.

[2590] cDNA was assayed by qPCR on the QuantStudio 5—Real-Time PCR System (Thermo Fisher, USA) using TaqMan Gene Expression Master Mix (Thermofisher, USA). The sequence detection primers and FAM custom probes that were used in this study were synthesized by Integrated DNA Technologies and can be found in Table E10.

[2591] Mouse GAPDH was used as an endogenous control in duplicates (ThermoFisher, USA) for both RT and no RT samples. All reactions including the cDNA samples and different dilutions of a known quantity of the linearized eGFP plasmid standards were run in triplicate on the same plate. The standard curve method was used to calculate the quantities of mRNA copies and was normalized using the no RT signal and the total amount of RNA input into the RT reaction.

### One-Step RT-ddPCR

[2592] RNA was diluted in nuclease-free water and combined with the reagents from the One Step RT-ddPCR Advanced Kit for Probes (Bio-Rad, USA; Catalog #1864022) and eGFP primer/probe set with final primer concentrations of 900 nM and probe concentrations of 250 nM to measure transgene expression. After the RT-ddPCR reaction setup, each reaction was converted to droplets using the Automated Droplet Generator (Bio-Rad, USA) according to the manufacturer's instructions. After the droplet generation, the droplets were subjected to endpoint PCR thermocycling with the following cycling conditions: 1 cycle of 48 C for 1 hour for reverse transcription followed by 1 cycle of 95 C for 10 mins; 40 cycles of 95 C for 30 sec, 60 C for 1 min; and 1 cycle of 98 C for 10 min and finally a 4 C hold. The cycled plate was then transferred to the QX200 Droplet Reader (Bio-Rad, USA) and analyzed using QX Manager Software (Bio-Rad, USA).

TABLE E10
Primers and probes designed to quantify eGFP, wild-type Ring2 (WT R2),
and wild-type Ring19 (WT R19) genomic sequences.

| Target | Label | Sequence (5′→3′) |
|---|---|---|
| eGFP | Forward Primer | GAACCGCATCGAGCTGAA (SEQ ID NO: |
| | | 2690) |
| | Reverse Primer | TGCTTGTCGGCCATGATATAG (SEQ ID |
| | | NO: 2691) |
| | Probe (FAM) | ATCGACTTCAAGGAGGACGGCAAC |
| | | (SEQ ID NO: 2692) |
| WT R2 | Forward Primer | GAAGCCCACCAAAAGCAATT (SEQ ID |
| | | NO: 2703) |
| | Reverse Primer | AGTTCCCGTGTCTATAGTCGA (SEQ ID |
| | | NO: 2704) |
| | Probe (FAM) | ACTTCGTTACAGAGTCCAGGGG (SEQ |
| | | ID NO: 2705) |
| WT R19 | Forward Primer | GGATTTTGGGAGGGTCACTC (SEQ ID |
| | | NO: 2693) |
| | Reverse Primer | TACAGTTCCTGGACCTGTGT (SEQ ID |
| | | NO: 2694) |
| | Probe (FAM) | ACACTGGTACCCTAAAAATAGATTTCA |
| | | (SEQ ID NO: 2695) |

### Results

### Infectivity of Cross-Packaged Anellovector R2-fCMV-eGFP (“R2-eGFP”)

[2593] The prepared virus preparations were injected into mice subretinally as shown in Table E2. Mice were injected with PBS, R2-eGFP (Ring2 ORF1 encapsulating the Ring19-eGFP genetic element), R19-eGFP (Ring19 ORF1 encapsulating the Ring19-eGFP genetic element), or dose-matched AAV2-eGFP. 21 days after injection, the posterior eye cup (PEC) and retina were collected and processed separately.

TABLE E2
Experimental design for testing in vivo infectivity of cross-packaged Anellovectors.

| Group | Treatment | Dose/eye (vg) | Route (volume) | N (eyes) | Terminal Day |
|---|---|---|---|---|---|
| 1 | PBS | 0 | Subretinal (1 ul) | 12 | 21 |
| 2 | R2-fCMV-eGFP (“R2-eGFP”) | 1.2e+7 | Subretinal (1 ul) | 12 | 21 |
| 3 | R19-fCMV-eGFP (“R19-eGFP”) | 1.2e+7 | Subretinal (1 ul) | 12 | 21 |
| 4 | AAV2-fCMV-eGFP (“AAV2-eGFP”) | 1.2e+7 | Subretinal (1 ul) | 11 | 21 |

[2594] eGFP genomes were detected by qPCR in the PEC and retina transduced with the cross packaged R2-eGFP Anellovector (R2 ORF1 encapsulating a R19-eGFP genome), R19-eGFP Anellovector (R19 ORF1 encapsulating a R19-eGFP genome), and AAV2-eGFP (FIG. 94A and FIG. 94B). The level of eGFP genomic DNA was greater in the PEC transduced with either R2-eGFP or R19-eGFP Anellovectors compared to PEC transduced with dose-matched AAV2-eGFP (FIG. 94A). Furthermore, the level of eGFP genomic DNA in PEC transduced with R2-eGFP was similar to the level of eGFP genomic DNA transduced with R19-eGFP Anellovector (FIG. 94A), demonstrating that cross-packaged Anellovectors can transduce genetic material in vivo at a level similar to non-cross-packaged Anellovectors. Wild type (WT) Ring2 and Ring19 genomes were not detected by qPCR in either the PEC or retina at day 21 (FIGS. 94C-94F), demonstrating that Anellovectors can be produced efficiently without wild type contamination.

Administration of Cross Packaged Anellovector R2-fCMV-eGFP (“R2-eGFP”) Induces eGFP mRNA Expression

[2595] To determine whether cross packaged Anellovector R2-eGFP (Ring2 ORF1 encapsulating the Ring19-eGFP genetic element) can induce eGFP expression, RNA was collected from PEC and retina tissue at 21 days after infection (n=5 eyes per group). eGFP mRNA was then quantified by RT-qPCR. eGFP mRNA was detected in both the PEC and the retina 21 days after infection with R2-eGFP (Ring2 ORF1 encapsulating the Ring19-eGFP genetic element), R19-eGFP (Ring19 ORF1 encapsulating the Ring19-eGFP genetic element), and AAV2-eGFP, while no eGFP mRNA was detected in the PBS control group (FIG. 95A and FIG. 95C). The levels of eGFP mRNA in the PEC and retina infected with R2-eGFP Anellovector were similar to the levels of eGFP mRNA in the PEC and retina infected with R19-eGFP Anellovector (FIG. 95A and FIG. 95C). One-step RT-ddPCR was further conducted (FIG. 95B and FIG. 95D) and the presence of eGFP mRNA was confirmed in the PEC.

Administration of Cross Packaged Anellovector R2-fCMV-eGFP (“R2-eGFP”) Results in eGFP Protein Expression

[2596] To determine whether administration of R2-eGFP Anellovector (Ring2 ORF1 encapsulating the Ring19-eGFP genetic element) can produce functional eGFP protein in vivo, PEC was collected at day 21 after infection for fixation and flatmount imaging (n=3 eyes per group). To determine true eGFP expression, representative sections of the tissue were imaged in both the eGFP and Texas red channels. Overlapping these channels showed that any area where only eGFP signal was detected showed true eGFP expression, while any signal that overlapped between the eGFP and Texas red channels was caused by red blood cell autofluorescence. FIGS. 96A-96C show the eGFP channel, Texas red channel, and overlap of the two channels for the PBS control group, respectively. No eGFP positive cells were found in the PBS negative control group. FIGS. 96D-96F show the eGFP channel, Texas red channel, and overlap of the two channels for the R2-eGFP group (Ring2 ORF1 packaging the Ring19-eGFP genetic element), respectively. Cells expressing eGFP protein are shown by the white arrows in FIG. 96F. FIGS. 96G-96I show the eGFP channel, Texas red channel, and overlap of the two channels for the R19-eGFP group (Ring19 ORF1 packaging the Ring19-eGFP genetic element), respectively. An example of a cell expressing eGFP protein is shown by the white arrow in FIG. 96F. FIGS. 96J-96L show the eGFP channel, Texas red channel, and overlap of the two channels for the dose-matched AAV2-eGFP group, respectively. eGFP positive cells in the R2-eGFP, R19-eGFP, and AAV2-eGFP groups were found using this imaging technique (FIGS. 96F, 96I, and 96L, respectively; see arrows). These data show that administration of a cross packaged R2-eGFP Anellovector, with Ring2 ORF1 encapsulating a Ring19 genetic element, resulted in expression of functional eGFP protein in vivo.

The application's sequence listing, which the Patent Office published only in electronic form, follows.

SEQUENCE LISTING (2786 sequences)

SEQ ID NO: 1 - DNA, 3570 bp, Alphatorquevirus sp.
  source 1..3570: mol_type = genomic DNA
attttgtgcagcccgccaattctcgttcaaacaggccaatcaggaggctctacgtacacttcctggggtgtgtcttcgaagagtatataagcagaggcggtgacgaatggtagagtttttcctggcccgtccgcggcgagagcgcgagcggagcgagcgatcgagcgtcccgtgggcgggtgccgtaggtgagtttacacaccgcagtcaaggggcaattcgggctcgggactggccgggctatgggcaagattcttaaaaaattcccccgatccctctgtcgccaggacataaaaacatgccgtggagaccgccggtgcatagtgtccaggggcgagaggatcagtggttcgcgagcttttttcacggccacgcttcattttgcggttgcggtgacgctgttggccatcttaatagcattgctcctcgctttcctcgcgccggtccaccaaggccccctccggggctagagcagcctaaccccccgcagcagggcccggccgggcccggagggccgcccgccatcttggcgctgccggctccgcccgcggagcctgacgacccgcagccacggcgtggtggtggggacggtggcgccgccgctggcgccgcaggcgaccgtggagaccgagactacgacgaagaagagctagacgagcttttccgcgccgccgccgaagacgatttgtaagtaggagatggcgccggccttacaggcgcaggaggagacgcgggcgacgcagacgcagacgcagacgcagacataagcccaccctagtactcagacagtggcaacctgacgttatcagacactgtaagataacaggacggatgcccctcattatctgtggaaaggggtccacccagttcaactacatcacccacgcggacgacatcacccccaggggagcctcctacgggggcaacttcacaaacatgactttctccctggaggcaatatacgaacagtttctgtaccacagaaacaggtggtcagcctccaaccacgacctcgaactctgcagatacaagggtaccaccctaaaactgtacaggcacccagatgtagactacatagtcacctacagcagaacgggaccctttgagatcagccacatgacctacctcagcactcacccccttctcatgctgctaaacaaacaccacatagtggtgcccagcctaaagactaagcccaggggcagaaaggccataaaagtcagaataagaccccccaaactcatgaacaacaagtggtacttcaccagagacttctgtaacataggcctcttccagctctgggccacaggcttagaactcagaaacccctggctcagaatgagcaccctgagcccctgcataggcttcaatgtccttaaaaacagcatttacacaaacctcagcaacctacctcagcacagagaagacagacttaacattattaacaacacattacacccacatgacataacaggaccaaacaataaaaaatggcagtacacatataccaaactcatggcccccatttactattcagcaaacagggccagcacctatgacttactacgagagtatggcctctacagtccatactacctaaaccccacaaggataaaccttgactggatgaccccctacacacacgtcaggtacaatccactagtagacaagggcttcggaaacagaatatacatacagtggtgctcagaggcagatgtaagctacaacaggactaaatccaagtgtctcttacaagacatgcccctgtttttcatgtgctatggctacatagactgggcaattaaaaacacaggggtctcctcactagcgagagacgccagaatctgcatcaggtgtccctacacagagccacagctggtgggctccacagaagacatagggttcgtacccatcacagagaccttcatgaggggcgacatgccggtacttgcaccatacataccgttgagctggttttgcaagtggtatcccaacatagctcaccagaaggaagtacttgaggcaatcatttcctgcagccccttcatgccccgtgaccagggcatgaacggttgggatattacaataggttacaaaatggacttcttatggggcggttcccctctcccctcacagccaatcgacgacccctgccagcagggaacccacccgattcccgaccccgataagcaccctcgcctcctacaagtgtcgaacccgaaactgctcggaccgaggacagtgttccacaagtgggacatcagacgtgggcagtttagcaaaagaagtattaaaagagtgtcagaatactcatcggatgatgaatctcttgcgccaggtctcccatcaaagcgaaacaagctcgactcggccttcagaggagaaaacccagagcaaaaagaatgctattctctcctcaaagcactcgaggaagaagagaccccagaagaagaagaaccagcaccccaagaaaaagcccagaaagaggagctactccaccagctccagctccagagacgccaccagcgagtcctcagacgagggctcaagctcgtctttacagacatcctccgactccgccagggagtccactggaaccccgagctcacatagagcccccaccttacataccagacctactttttcccaatactggtaaaaaaaaaaaattctctcccttcgactgggaaacggaggcccagctagcagggatattcaagcgtcctatgcgcttctatccctcagacacccctcactacccgtggttaccccccaagcgcgatatcccgaaaatatgtaacataaacttcaaaataaagctgcaagagtgagtgattcgaggccctcctctgttcacttagcggtgtctacctcttaaagtcaccaagcactccgagcgtcagcgaggagtgcgaccctccaccaaggggcaacttcctcggggtccggcgctacgcgcttcgcgctgcgccggacgcctcggacccccccccgacccgaatcgctcgcgcgattcggacctgcggcctcggggggggtcgggggctttactaaacagactccgagttgccactggactcaggagctgtgaatcagtaacgaaagtgagtggggccagacttcgccatagggcctttaacttggggtcgtctgtcggtggcttccgggtccgcctgggcgccgccattttagctttagacgccattttaggccctcgcgggcacccgtaggcgcgttttaatgacgtcacggcagccattttgtcgtgacgtttgagacacgtgatgggggcgtgcctaaacccggaagcatccctggtcacgtgactctgacgtcacggcggccattttgtgctgtccgccatcttgtgacttccttccgctttttcaaaaaaaaagaggaagtatgacagtagcggcgggggggcggccgcgttcgcgcgccgcccaccagggggtgctgcgcgcccccccccgcgcatgcgcggggcccccccccgggggggctccgcccccccggcccccccccgtgctaaacccaccgcgcatgcgcgaccacgcccccgccgcc

SEQ ID NO: 2 - protein, 130 aa, Alphatorquevirus sp.
MPWRPPVHSVQGREDQWFASFFHGHASFCGCGDAVGHLNSIAPRFPRAGPPRPPPGLEQPNPPQQGPAGPGGPPAILALPAPPAEPDDPQPRRGGGDGGAAAGAAGDRGDRDYDEEELDELFRAAAEDDL

SEQ ID NO: 3 - protein, 303 aa, Alphatorquevirus sp.
MPWRPPVHSVQGREDQWFASFFHGHASFCGCGDAVGHLNSIAPRFPRAGPPRPPPGLEQPNPPQQGPAGPGGPPAILALPAPPAEPDDPQPRRGGGDGGAAAGAAGDRGDRDYDEEELDELFRAAAEDDFQSTTPASREPTRFPTPISTLASYKCRTRNCSDRGQCSTSGTSDVGSLAKEVLKECQNTHRMMNLLRQVSHQSETSSTRPSEEKTQSKKNAILSSKHSRKKRPQKKKNQHPKKKPRKRSYSTSSSSRDATSESSDEGSSSSLQTSSDSARESTGTPSSHRAPTLHTRPTFSQYW

SEQ ID NO: 4 - protein, 293 aa, Alphatorquevirus sp.
MPWRPPVHSVQGREDQWFASFFHGHASFCGCGDAVGHLNSIAPRFPRAGPPRPPPGLEQPNPPQQGPAGPGGPPAILALPAPPAEPDDPQPRRGGGDGGAAAGAAGDRGDRDYDEEELDELFRAAAEDDLSPIKAKQARLGLQRRKPRAKRMLFSPQSTRGRRDPRRRRTSTPRKSPERGATPPAPAPETPPASPQTRAQARLYRHPPTPPGSPLEPRAHIEPPPYIPDLLFPNTGKKKKFSPFDWETEAQLAGIFKRPMRFYPSDTPHYPWLPPKRDIPKICNINFKIKLQE

SEQ ID NO: 5 - protein, 180 aa, Alphatorquevirus sp.
MPWRPPVHSVQGREDQWSPIKAKQARLGLQRRKPRAKRMLFSPQSTRGRRDPRRRRTSTPRKSPERGATPPAPAPETPPASPQTRAQARLYRHPPTPPGSPLEPRAHIEPPPYIPDLLFPNTGKKKKFSPFDWETEAQLAGIFKRPMRFYPSDTPHYPWLPPKRDIPKICNINFKIKLQE

SEQ ID NO: 6 - protein, 680 aa, Alphatorquevirus sp.
TAWWWGRWRRRWRRRRPWRPRLRRRRARRAFPRRRRRRFVSRRWRRPYRRRRRRGRRRRRRRRRHKPTLVLRQWQPDVIRHCKITGRMPLIICGKGSTQFNYITHADDITPRGASYGGNFTNMTFSLEAIYEQFLYHRNRWSASNHDLELCRYKGTTLKLYRHPDVDYIVTYSRTGPFEISHMTYLSTHPLLMLLNKHHIVVPSLKTKPRGRKAIKVRIRPPKLMNNKWYFTRDFCNIGLFQLWATGLELRNPWLRMSTLSPCIGFNVLKNSIYTNLSNLPQHREDRLNIINNTLHPHDITGPNNKKWQYTYTKLMAPIYYSANRASTYDLLREYGLYSPYYLNPTRINLDWMTPYTHVRYNPLVDKGFGNRIYIQWCSEADVSYNRTKSKCLLQDMPLFFMCYGYIDWAIKNTGVSSLARDARICIRCPYTEPQLVGSTEDIGFVPITETFMRGDMPVLAPYIPLSWFCKWYPNIAHQKEVLEAIISCSPFMPRDQGMNGWDITIGYKMDFLWGGSPLPSQPIDDPCQQGTHPIPDPDKHPRLLQVSNPKLLGPRTVFHKWDIRRGQFSKRSIKRVSEYSSDDESLAPGLPSKRNKLDSAFRGENPEQKECYSLLKALEEEETPEEEEPAPQEKAQKEELLHQLQLQRRHQRVLRRGLKLVFTDILRLRQGVHWNPELT

SEQ ID NO: 7 - protein, 197 aa, Alphatorquevirus sp.
TAWWWGRWRRRWRRRRPWRPRLRRRRARRAFPRRRRRRFPIDDPCQQGTHPIPDPDKHPRLLQVSNPKLLGPRTVFHKWDIRRGQFSKRSIKRVSEYSSDDESLAPGLPSKRNKLDSAFRGENPEQKECYSLLKALEEEETPEEEEPAPQEKAQKEELLHQLQLQRRHQRVLRRGLKLVFTDILRLRQGVHWNPELT

SEQ ID NO: 8 - protein, 145 aa, Alphatorquevirus sp.
TAWWWGRWRRRWRRRRPWRPRLRRRRARRAFPRRRRRRFVSHQSETSSTRPSEEKTQSKKNAILSSKHSRKKRPQKKKNQHPKKKPRKRSYSTSSSSRDATSESSDEGSSSSLQTSSDSARESTGTPSSHRAPTLHTRPTFSQYW

SEQ ID NO: 9 - DNA, 3451 bp, Alphatorquevirus sp.
  source 1..3451: mol_type = genomic DNA
aattttgctaaacagactccgaggtgctcttggacactgagtgggcgtacagcaacgaaagtgagtggggccagacttcgccataaggcctttatcttcgggtctacatcataatataaagatgtgcacttccgaatggctgagtttttcacgccattccgcagcggtggagcagcgcagccacgacccccgcgtcccgagggcgggtgccggaggtgagtttacacaccgcagtcaaggggcaattcgggctcgggactggccgggcccgggcaaggctcttaaagcgaaaccatgttcctcggcaggccctaccgccacagaaagcggcaccaggccggcaagaaagggccactgccactgccaaatctgcaacctgcacaggagaaacgggctggtggtccgtccttgatggcctccggacgcaggggatggatgcccccggacctgacggtccaggagagggaggatgcctggtggaccagcttctgcgctagccaccgcagcttttgtagctgcgacgatcctgtgggccatattaatactctcgcccgcgataatagtcctctggcccagactcctactacaacttcaggccaggggccgccgccgccgcctacgcctccgcggacgccggggccgcgccctgggtctgctccggaccaggggggaaggatcagggcctcctggacctaccccctagcccccggaggtcccggtagcacgccatggcctactggtggggccggagacgccggtggcgccgctggaggaggcgccggcgtcctctccgccgccgccggcggtggcggagaaggcgacgctggcccagaaggcgccggtggaggcgaaggagacgacgtgcgagacctgctcgccgctatcgaaggagacgtgggcgcagacgggtaaggagacgccgtcgcccccagaaactagtactgactcagtggaatccccagactgtgagaaagtgtgttattagggggtttctgcccctgttcttctgcggacagggggcctaccacagaaactttacagaccactatgacgatgtgttccccaagggacccagcggaggtgggcacgggagcatggtgttcaacctgtcctttctgtaccaagagtttaagaagcaccacaataagtggtcgcgcagcaacctggactttgacttagtgagatacaagggcacagtgataaagctgtacagacaccaggactttgactacatagtgtggataagcaggacccctcccttccaggagagcctgctcacagtaatgacccaccagcccagcgtcatgctgcaggcaaaaaagtgcataatagtaaagagctacaggacccacccggggggcaaaccctatgtaactgcaaaagttaggccccccagactcctaactgacaagtggtacttccagtcagacttctgcaacgttccgctttttagcctacagtttgcccttgcggaactgcggtttccgatctgctcaccacaaactgacaccaattgcattaacttcctggtgttagatgacatctactacaagtttctagataataagcctaaacagagttcagaccctaatgacgaaaacagaataaaattctggcacggcctatggtccactatgagatatttaaacaccacctacataaacacactgtttccaggcacagacagtctagtggccgccaaagatactgacaatagtgtaaataaataccccagcacagccactaaacagccctacaaagacagtcagtacatgcaaaatatatggaatacatcaaaaatacatgccttatatacgtgggtagcagagacaaactacaaaagactgcaggcctactacacacagacctacggaggctaccagagacaatttttcacaggaaaacagtactgggactacagagtaggcatgtttagtccagccttcctgagtcccagcagactaaatccccagaacccaggggcatacacagaggtctcctacaacccctggacagacgagggcacgggcaacgtagtgtgcctgcagtatctgactaaagagacctcagactacaaaccaggtggtgggagcaagttctgcatagaaggtgtgcctctatgggcagcgctggtgggatacgtagacatgtgtaaaaaagagggcaaggacccgggcatcagactaaactgtctcctgttagtcaagtgtccctatacaaagcctcagctgtatgacaaaaaaaaccccgagaaactgtttgtaccttactcctataactttgggcacggcaagatgccggggggagacaaatacatacccatagagttcaaagacaggtggtacccctgcctgctccaccaagaggagtggatagaggacattgtcaggtcgggacccttcgttccaaaagacatgcccagcagcgtcacctgcatgatgaggtacagctctctttttaactggggcggtaatataatccaagaacaggccgtggaagacccctgtaagaaaggcaccttcgtcgttcccggaaccagtggcatcgctcgcatactacaagtcagcaacccggccaagcagacccccacgacaacctggcactcgtgggactggagacgatccctctttacagagacgggtcttaaaagaatgcgcgaacaacaaccatatgatgaactgtcttatacgggccctaaaaagccaaaactgtcccttcccgcagggcccgccgtccccggtgccgccgtcgcctcctcctggtgggaaacaaaacaggtcacctcgccagacgtcagcgagacggagaccgaagcagaagcccaccaagaggaagagacggagccggaggagggagtccagctccagcagctgtgggagcagcaactcctgcaaaagcgacagctgggagtcgtgttccagcaactcctccgactcagacagggggcggagatccacccgggcctcgtataattcctgggccccagaacccgtacctgcttttcccggagcaggcccctccaaaagtgcctatttttgacccctttggtcagaaaacagagctagagctgtgcggctgcttcgacaggccgcccaggaacaacccctacgaccaccccttctacccctggctgcccaaagagcctccctcctactaccagggctacaaagtgtctttcaaactagggttccacccagacaagcatgtgtgaaccccgccaataaaccactgctgctacactgattcttaggccgtgggagtctcactggtcggtgtctacctcttaaggtcactaagcactccgagcgttagcgaggagtgcgaccctaccccctgggcccacttcttcggagccgcgcgctacgccttcggctgcgcgcggcacctcagacccccgctcgtgctgacacgcttgcgcgtgtcagaccacttcgggctcgcgggggtcggg

SEQ ID NO: 10 - protein, 166 aa, Alphatorquevirus sp.
MASGRRGWMPPDLTVQEREDAWWTSFCASHRSFCSCDDPVGHINTLARDNSPLAQTPTTTSGQGPPPPPTPPRTPGPRPGSAPDQGGRIRASWTYPLAPGGPGSTPWPTGGAGDAGGAAGGGAGVLSAAAGGGGEGDAGPEGAGGGEGDDVRDLLAAIEGDVGADG

SEQ ID NO: 11 - protein, 348 aa, Alphatorquevirus sp.
MASGRRGWMPPDLTVQEREDAWWTSFCASHRSFCSCDDPVGHINTLARDNSPLAQTPTTTSGQGPPPPPTPPRTPGPRPGSAPDQGGRIRASWTYPLAPGGPGSTPWPTGGAGDAGGAAGGGAGVLSAAAGGGGEGDAGPEGAGGGEGDDVRDLLAAIEGDVGADGPWKTPVRKAPSSFPEPVASLAYYKSATRPSRPPRQPGTRGTGDDPSLQRRVLKECANNNHMMNCLIRALKSQNCPFPQGPPSPVPPSPPPGGKQNRSPRQTSARRRPKQKPTKRKRRSRRRESSSSSCGSSNSCKSDSWESCSSNSSDSDRGRRSTRASYNSWAPEPVPAFPGAGPSKSAYF

SEQ ID NO: 12 - protein, 327 aa, Alphatorquevirus sp.
MASGRRGWMPPDLTVQEREDAWWTSFCASHRSFCSCDDPVGHINTLARDNSPLAQTPTTTSGQGPPPPPTPPRTPGPRPGSAPDQGGRIRASWTYPLAPGGPGSTPWPTGGAGDAGGAAGGGAGVLSAAAGGGGEGDAGPEGAGGGEGDDVRDLLAAIEGDVGADGARRPRCRRRLLLVGNKTGHLARRQRDGDRSRSPPRGRDGAGGGSPAPAAVGAATPAKATAGSRVPATPPTQTGGGDPPGPRIIPGPQNPYLLFPEQAPPKVPIFDPFGQKTELELCGCFDRPPRNNPYDHPFYPWLPKEPPSYYQGYKVSFKLGFHPDKHV

SEQ ID NO: 13 - protein, 747 aa, Alphatorquevirus sp.
MAYWWGRRRRWRRWRRRRRPLRRRRRWRRRRRWPRRRRWRRRRRRARPARRYRRRRGRRRVRRRRRPQKLVLTQWNPQTVRKCVIRGFLPLFFCGQGAYHRNFTDHYDDVFPKGPSGGGHGSMVFNLSFLYQEFKKHHNKWSRSNLDFDLVRYKGTVIKLYRHQDFDYIVWISRTPPFQESLLTVMTHQPSVMLQAKKCIIVKSYRTHPGGKPYVTAKVRPPRLLTDKWYFQSDFCNVPLFSLQFALAELRFPICSPQTDTNCINFLVLDDIYYKFLDNKPKQSSDPNDENRIKFWHGLWSTMRYLNTTYINTLFPGTDSLVAAKDTDNSVNKYPSTATKQPYKDSQYMQNIWNTSKIHALYTWVAETNYKRLQAYYTQTYGGYQRQFFTGKQYWDYRVGMFSPAFLSPSRLNPQNPGAYTEVSYNPWTDEGTGNVVCLQYLTKETSDYKPGGGSKFCIEGVPLWAALVGYVDMCKKEGKDPGIRLNCLLLVKCPYTKPQLYDKKNPEKLFVPYSYNFGHGKMPGGDKYIPIEFKDRWYPCLLHQEEWIEDIVRSGPFVPKDMPSSVTCMMRYSSLFNWGGNIIQEQAVEDPCKKGTFVVPGTSGIARILQVSNPAKQTPTTTWHSWDWRRSLFTETGLKRMREQQPYDELSYTGPKKPKLSLPAGPAVPGAAVASSWWETKQVTSPDVSETETEAEAHQEEETEPEEGVQLQQLWEQQLLQKRQLGVVFQQLLRLRQGAEIHPGLV

SEQ ID NO: 14 - protein, 220 aa, Alphatorquevirus sp.
MAYWWGRRRRWRRWRRRRRPLRRRRRWRRRRRWPRRRRWRRRRRRARPARRYRRRRGRRRAVEDPCKKGTFVVPGTSGIARILQVSNPAKQTPTTTWHSWDWRRSLFTETGLKRMREQQPYDELSYTGPKKPKLSLPAGPAVPGAAVASSWWETKQVTSPDVSETETEAEAHQEEETEPEEGVQLQQLWEQQLLQKRQLGVVFQQLLRLRQGAEIHPGLV

SEQ ID NO: 15 - protein, 164 aa, Alphatorquevirus sp.
MAYWWGRRRRWRRWRRRRRPLRRRRRWRRRRRWPRRRRWRRRRRRARPARRYRRRRGRRRGPPSPVPPSPPPGGKQNRSPRQTSARRRPKQKPTKRKRRSRRRESSSSSCGSSNSCKSDSWESCSSNSSDSDRGRRSTRASYNSWAPEPVPAFPGAGPSKSAYF

SEQ ID NO: 16 - DNA, 3753 bp, Alphatorquevirus sp.
  source 1..3753: mol_type = genomic DNA
tgctacgtcactaacccacgtgtcctctacaggccaatcgcagtctatgtcgtgcacttcctgggcatggtctacataattatataaatgcttgcacttccgaatggctgagtttttgctgcccgtccgcggagaggagccacggcaggggatccgaacgtcctgagggcgggtgccggaggtgagtttacacaccgaagtcaaggggcaattcgggctcaggactggccgggctttgggcaaggctcttaaaaatgcacttttctcgaataagcagaaagaaaaggaaagtgctactgctttgcgtgccagcagctaagaaaaaaccaactgctatgagcttctggaaacctccggtacacaatgtcacggggatccaacgcatgtggtatgagtcctttcaccgtggccacgcttctttttgtggttgtgggaatcctatacttcacattactgcacttgctgaaacatatggccatccaacaggcccgagaccttctgggccaccgggagtagaccccaacccccacatccgtagagccaggcctgccccggccgctccggagccctcacaggttgattcgagaccagccctgacatggcatggggatggtggaagcgacggaggcgctggtggttccggaagcggtggacccgtggcagacttcgcagacgatggcctcgatcagctcgtcgccgccctagacgacgaagagtaaggaggcgcagacggtggaggagggggagacgaaaaacaaggacttacagacgcaggagacgctttagacgcaggggacgaaaagcaaaacttataataaaactgtggcaacctgcagtaattaaaagatgcagaataaagggatacataccactgattataagtgggaacggtacctttgccacaaactttaccagtcacataaatgacagaataatgaaaggccccttcgggggaggacacagcactatgaggttcagcctctacattttgtttgaggagcacctcagacacatgaacttctggaccagaagcaacgataacctagagctaaccagatacttgggggcttcagtaaaaatatacaggcacccagaccaagactttatagtaatatacaacagaagaacccctctaggaggcaacatctacacagcaccctctctacacccaggcaatgccattttagcaaaacacaaaatattagtaccaagtttacagacaagaccaaagggtagaaaagcaattagactaagaatagcaccccccacactctttacagacaagtggtactttcaaaaggacatagccgacctcacccttttcaacatcatggcagttgaggctgacttgcggtttccgttctgctcaccacaaactgacaacacttgcatcagcttccaggtccttagttccgtttacaacaactacctcagtattaatacctttaataatgacaactcagactcaaagttaaaagaatttttaaataaagcatttccaacaacaggcacaaaaggaacaagtttaaatgcactaaatacatttagaacagaaggatgcataagtcacccacaactaaaaaaaccaaacccacaaataaacaaaccattagagtcacaatactttgcacctttagatgccctctggggagaccccatatactataatgatctaaatgaaaacaaaagtttgaacgatatcattgagaaaatactaataaaaaacatgattacataccatgcaaaactaagagaatttccaaattcataccaaggaaacaaggccttttgccacctaacaggcatatacagcccaccatacctaaaccaaggcagaatatctccagaaatatttggactgtacacagaaataatttacaacccttacacagacaaaggaactggaaacaaagtatggatggacccactaactaaagagaacaacatatataaagaaggacagagcaaatgcctactgactgacatgcccctatggactttactttttggatatacagactggtgtaaaaaggacactaataactgggacttaccactaaactacagactagtactaatatgcccttatacctttccaaaattgtacaatgaaaaagtaaaagactatgggtacatcccgtactcctacaaattcggagcgggtcagatgccagacggcagcaactacataccctttcagtttagagcaaagtggtaccccacagtactacaccagcaacaggtaatggaggacataagcaggagcgggccctttgcacctaaggtagaaaaaccaagcactcagctggtaatgaagtactgttttaactttaactggggcggtaaccctatcattgaacagattgttaaagaccccagcttccagcccacctatgaaatacccggtaccggtaacatccctagaagaatacaagtcatcgacccgcgggtcctgggaccgcactactcgttccggtcatgggacatgcgcagacacacatttagcagagcaagtattaagagagtgtcagaacaacaagaaacttctgaccttgtattctcaggcccaaaaaagcctcgggtcgacatcccaaaacaagaaacccaagaagaaagctcacattcactccaaagagaatcgagaccgtgggagaccgaggaagaaagcgagacagaagccctctcgcaagagagccaagaggtccccttccaacagcagttgcagcagcagtaccaagagcagctcaagctcagacagggaatcaaagtcctcttcgagcagctcataaggacccaacaaggggtccatgtaaacccatgcctacggtaggtcccaggcagtggctgtttccagagagaaagccagccccagctcctagcagtggagactgggccatggagtttctcgcagcaaaaatatttgataggccagttagaagcaaccttaaagataccccttactacccatatgttaaaaaccaatacaatgtctactttgaccttaaatttgaataaacagcagcttcaaacttgcaaggccgtgggagtttcactggtcggtgtctacctctaaaggtcactaagcactccgagcgtaagcgaggagtgcgaccctcccccctggaacaacttcttcggagtccggcgctacgccttcggctgcgccggacacctcagaccccccctccacccgaaacgcttgcgcgtttcggaccttcggcgtcgggggggtcgggagctttattaaacggactccgaagtgctcttggacactgagggggtgaacagcaacgaaagtgagtggggccagacttcgccataaggcctttatcttcttgccatttgtcagtgtccggggtcgccataggcttcgggctcgtttttaggccttccggactacaaaaatcgccattttggtgacgtcacggccgccatcttaagtagttgaggcggacggtggcgtgagttcaaaggtcaccatcagccacacctactcaaaatggtggacaatttcttccgggtcaaaggttacagccgccatgttaaaacacgtgacgtatgacgtcacggccgccattttgtgacacaagatggccgacttccttcctctttttcaaaaaaaagcggaagtgccgccgcggcggcggggggcggcgcgctgcgcgcgccgcccagtagggggagccatgcgcccccccccgcgcatgcgcggggcccccccccgcggggggctccgccccccggccccccccg

SEQ ID NO: 17 - protein, 127 aa, Alphatorquevirus sp.
MSFWKPPVHNVTGIQRMWYESFHRGHASFCGCGNPILHITALAETYGHPTGPRPSGPPGVDPNPHIRRARPAPAAPEPSQVDSRPALTWHGDGGSDGGAGGSGSGGPVADFADDGLDQLVAALDDEE

SEQ ID NO: 18 - protein, 268 aa, Alphatorquevirus sp.
MSFWKPPVHNVTGIQRMWYESFHRGHASFCGCGNPILHITALAETYGHPTGPRPSGPPGVDPNPHIRRARPAPAAPEPSQVDSRPALTWHGDGGSDGGAGGSGSGGPVADFADDGLDQLVAALDDEELLKTPASSPPMKYPVPVTSLEEYKSSTRGSWDRTTRSGHGTCADTHLAEQVLRECQNNKKLLTLYSQAQKSLGSTSQNKKPKKKAHIHSKENRDRGRPRKKARQKPSRKRAKRSPSNSSCSSSTKSSSSSDRESKSSSSSS

SEQ ID NO: 19 - protein, 276 aa, Alphatorquevirus sp.
MSFWKPPVHNVTGIQRMWYESFHRGHASFCGCGNPILHITALAETYGHPTGPRPSGPPGVDPNPHIRRARPAPAAPEPSQVDSRPALTWHGDGGSDGGAGGSGSGGPVADFADDGLDQLVAALDDEEPKKASGRHPKTRNPRRKLTFTPKRIETVGDRGRKRDRSPLAREPRGPLPTAVAAAVPRAAQAQTGNQSPLRAAHKDPTRGPCKPMPTVGPRQWLFPERKPAPAPSSGDWAMEFLAAKIFDRPVRSNLKDTPYYPYVKNQYNVYFDLKFE

SEQ ID NO: 20 - protein, 167 aa, Alphatorquevirus sp.
MSFWKPPVHNVTGIQRMWPKKASGRHPKTRNPRRKLTFTPKRIETVGDRGRKRDRSPLAREPRGPLPTAVAAAVPRAAQAQTGNQSPLRAAHKDPTRGPCKPMPTVGPRQWLFPERKPAPAPSSGDWAMEFLAAKIFDRPVRSNLKDTPYYPYVKNQYNVYFDLKFE

SEQ ID NO: 21 - protein, 743 aa, Alphatorquevirus sp.
MAWGWWKRRRRWWFRKRWTRGRLRRRWPRSARRRPRRRRVRRRRRWRRGRRKTRTYRRRRRFRRRGRKAKLIIKLWQPAVIKRCRIKGYIPLIISGNGTFATNFTSHINDRIMKGPFGGGHSTMRFSLYILFEEHLRHMNFWTRSNDNLELTRYLGASVKIYRHPDQDFIVIYNRRTPLGGNIYTAPSLHPGNAILAKHKILVPSLQTRPKGRKAIRLRIAPPTLFTDKWYFQKDIADLTLFNIMAVEADLRFPFCSPQTDNTCISFQVLSSVYNNYLSINTFNNDNSDSKLKEFLNKAFPTTGTKGTSLNALNTFRTEGCISHPQLKKPNPQINKPLESQYFAPLDALWGDPIYYNDLNENKSLNDIIEKILIKNMITYHAKLREFPNSYQGNKAFCHLTGIYSPPYLNQGRISPEIFGLYTEIIYNPYTDKGTGNKVWMDPLTKENNIYKEGQSKCLLTDMPLWTLLFGYTDWCKKDTNNWDLPLNYRLVLICPYTFPKLYNEKVKDYGYIPYSYKFGAGQMPDGSNYIPFQFRAKWYPTVLHQQQVMEDISRSGPFAPKVEKPSTQLVMKYCFNFNWGGNPIIEQIVKDPSFQPTYEIPGTGNIPRRIQVIDPRVLGPHYSFRSWDMRRHTFSRASIKRVSEQQETSDLVFSGPKKPRVDIPKQETQEESSHSLQRESRPWETEEESETEALSQESQEVPFQQQLQQQYQEQLKLRQGIKVLFEQLIRTQQGVHVNPCLR

SEQ ID NO: 22 - protein, 194 aa, Alphatorquevirus sp.
MAWGWWKRRRRWWFRKRWTRGRLRRRWPRSARRRPRRRRIVKDPSFQPTYEIPGTGNIPRRIQVIDPRVLGPHYSFRSWDMRRHTFSRASIKRVSEQQETSDLVFSGPKKPRVDIPKQETQEESSHSLQRESRPWETEEESETEALSQESQEVPFQQQLQQQYQEQLKLRQGIKVLFEQLIRTQQGVHVNPCLR

SEQ ID NO: 23 - protein, 113 aa, Alphatorquevirus sp.
MAWGWWKRRRRWWFRKRWTRGRLRRRWPRSARRRPRRRRAQKSLGSTSQNKKPKKKAHIHSKENRDRGRPRKKARQKPSRKRAKRSPSNSSCSSSTKSSSSSDRESKSSSSSS

SEQ ID NO: 24 - DNA, 3878 bp, Alphatorquevirus sp.
  source 1..3878: mol_type = genomic DNA
aaatacgtcactaaccacgtgactcccacaggccaaccacagtctatgtcgtgcacttcctgggcatggtctacgtgataatataaagcggtgcacttccgaatggctgagttttccacgcccgtccgcagcgagatcgcgacgtaggagcgatcgagcgtcccgagggcgggtgccggaggtgagtttacacaccgcagtcaaggggcaattcgggctcgggaggccgggccatgggcaaggctcttaaaaagctatgtttctcggtaaaatctacaggaagaaaaggaaactgcttctgcaggctgtgcgtgctccgcagacgccatcttccatgagccgctgctggtgtccccctcggggtgatgtctcctcccgcgagtctcgatggtacgaggcggttcgaggaagccacgatgctttttgtggctgtagtgatcctattcttcatctttctcgtctggctgcacgttttaaccatcagggacctccgacgccccccacggacgaccgtgcgccgcagaataccccagtgagacgcctgctgcctctccccagctaccccggcgagggtccccaggctagatggcctggtggggatggaggcgccgctggtggcgaccgaagagaaggtggagatggcggcgcgcgcgccgccgaagacgagtaccagcccgaagacctagacgagcttttcggcgctatcgaacaagaacagtaaggaggaggcgaagggggaggcggaggggctaccggcgccgttacagactgagacgctatgccagacgcaggttccgacgcaaaaagatagtactgactcagtggaacccccagactaccagaaaatgtataataaggggcatgatgccagtactgtgggccggcatgggtacggggggcagaaactatgcagtgaggtcagatgactatgtggtgaacaaagggttcgggggctccttcgccacggagaccttctccctgaaggttctctatgaccagtttcaaaggggcttcaacaggtggtcccacactaacgaggacctagacctggcccgctacaggggctgcaggtggactttttacagacataaagacacagactttatagtgtactttacaaacaatcctcccatgaagaccaaccagttctccgcgcccctgacgacccccggcatgctcatgcgcagtaaatacaaagtcctcattcccagcttccagaccagacccaagggtcgcaaaacagtaaccgttaaaataagaccccccaaactatttcaagacaagtggtacacccagcaggacctgtgttcagttcctcttgtccaactgaacgtgaccgcagctgatttcacacatccgttcggctcaccactaactgaaactccttgcgtagagttccaggtgctgggtgacttgtacaatacatgtctcaatatcgaccttccgcaatttagtgaattaggagaaataactagtgcctactcaaaaccaaactcaaataacctaaaagaattatacaaagaattgttcacaaaagccacatcaggacactactggcagacattcataaccaacagcatggtcagagcacacatagatgcagacaaagctaaagaagcacaaagagcatccaccacaccctcatacaacaatgaccccttccccacaatacctgttaaatcagagtttgcacagtggaaaaagaaattcacagacactagagacagcccctttctttttgccacttaccatcccgaagctataaaagacacaattatgaaaatgagagagaacaactttaagctagagacaggacccaatgacaagtatggagactacacagcacagtaccaaggaaacacacacatgctagactactaccttggcttttacagccccatattcctctcagatggaaggtctaacgtagaattcttcactgcctacagagacatagtatacaatcccttcttagacaaggcccagggcaacatggtgtggtttcagtaccacacaaagacagacaacaagtttaaaaaaccagagtgccactgggaaatcaaagacatgcccctgtgggccctcctaaacggatatgtagactacttagagactcaaatacagtatggtgacctcagtaaagaagggaaagtcctcatcaggtgtccctacaccaagccagcactagtagaccccagagacgacactgcaggatatgtagtctacaacagaaactttggcagaggcaagtggatagacggagggggctacatccccctgcacgagaggacaaaatggtacgtgatgctcagataccagacggacgtcttccatgacatagtgacctgtgggccctggcagtacagagacgacaacaaaaacagccagctagtggccaaataccgcttcagctttatatggggaggtaacactgtccactctcaggtcatcagaaacccgtgcaaagacaaccaagtatccggtccccgtcgacagcctagggatatacaagtcgttgacccgcaacgcatcacgccgccgtgggtcctccacagcttcgaccagcgaagaggcctctttactgaaacagctctcaggcgcctgctccaggaaccactacctggcgagtatgctgttagcaccctcaggacacccctcctctttctaccctcagaataccagcgagaagacggcgctgcagaaagcgcctcaggttcaccggccaaaagaccccgtatctggtcagaagagagtcagacggagacgatctcctcggaggagaacccggcggagacgacgagggagctcctccagcgaaagctccgagagcagcgagcactccagttccaactccagcacttcgcggtccaactcgccaagacccaggcgaatctccacgtaaaccccctgttatctttcccgcaatgaataaggtctttctgtttcccccagagggtcccaagcccatcctgggcaaagaggcctggcaggacgagtacgagacctgcagggtctggaacagacctgccagaacccaccacacagacacccccttctatccctgggccccccacaagttccatgtaagcttcaaacttggcttccaataaaattactaggccgtggaactctcactggtcggtgtctacctcttaaggtcactaagcactccgagcgtcagcgaggagtgcgaccctctaccctggtgcaacgccctcggcggccgcgcgctacgccttcggctgcgcgcggcacctcggacccccgctcgtgctgacgcgctcgcgcgcgtcagaccacttcgggctcgcgggggtcgggaattttgctaaacagactccgagttgccattggacactgtagctgtgaatcagtaacgaaagtgagtggggccagacttcgccatagggcctttatcttcttgccattggtccgtgtagggggtcgccataggcttcgacctcccttttaggccttccggactacaaaaatggcggattcagtgacgtcacggccgccattttaagtaggtgccgtccaggactgcagttccgggtcagagtgcatcctcggcggaacctgcacaaaatggcggtcaatatcttccgggtcaaaggtcacacctacgtcataagtcacgtgactgggtcctgctacgtcatatgcggaagtaggccccgccacgtgactcgtcacgtgggcgctgcgtcacggcggccattttgtatcacaaaatggcggacttccttcctcttttttaaaaataacggcccagcggcggcgcgcgcgcttcgcgcgcgcgccggggggctccgcccccccccgcgcatgcgcggggcccccccccgcggggggctccgccccccggtccccccccg

SEQ ID NO: 25 - protein, 128 aa, Alphatorquevirus sp.
MSRCWCPPRGDVSSRESRWYEAVRGSHDAFCGCSDPILHLSRLAARFNHQGPPTPPTDDRAPQNTPVRRLLPLPSYPGEGPQARWPGGDGGAAGGDRREGGDGGARAAEDEYQPEDLDELFGAIEQEQ

SEQ ID NO: 26 - protein, 279 aa, Alphatorquevirus sp.
MSRCWCPPRGDVSSRESRWYEAVRGSHDAFCGCSDPILHLSRLAARFNHQGPPTPPTDDRAPQNTPVRRLLPLPSYPGEGPQARWPGGDGGAAGGDRREGGDGGARAAEDEYQPEDLDELFGAIEQEQSSETRAKTTKYPVPVDSLGIYKSLTRNASRRRGSSTASTSEEASLLKQLSGACSRNHYLASMLLAPSGHPSSFYPQNTSEKTALQKAPQVHRPKDPVSGQKRVRRRRSPRRRTRRRRRGSSSSESSESSEHSSSNSSTSRSNSPRPRRIST

SEQ ID NO: 27 - protein, 272 aa, Alphatorquevirus sp.
MSRCWCPPRGDVSSRESRWYEAVRGSHDAFCGCSDPILHLSRLAARFNHQGPPTPPTDDRAPQNTPVRRLLPLPSYPGEGPQARWPGGDGGAAGGDRREGGDGGARAAEDEYQPEDLDELFGAIEQEQIPARRRRCRKRLRFTGQKTPYLVRRESDGDDLLGGEPGGDDEGAPPAKAPRAASTPVPTPALRGPTRQDPGESPRKPPVIFPAMNKVFLFPPEGPKPILGKEAWQDEYETCRVWNRPARTHHTDTPFYPWAPHKFHVSFKLGFQ

SEQ ID NO: 28 - protein, 780 aa, Alphatorquevirus sp.
MAWWGWRRRWWRPKRRWRWRRARRRRRVPARRPRRAFRRYRTRTVRRRRRGRRRGYRRRYRLRRYARRRFRRKKIVLTQWNPQTTRKCIIRGMMPVLWAGMGTGGRNYAVRSDDYVVNKGFGGSFATETFSLKVLYDQFQRGFNRWSHTNEDLDLARYRGCRWTFYRHKDTDFIVYFTNNPPMKTNQFSAPLTTPGMLMRSKYKVLIPSFQTRPKGRKTVTVKIRPPKLFQDKWYTQQDLCSVPLVQLNVTAADFTHPFGSPLTETPCVEFQVLGDLYNTCLNIDLPQFSELGEITSAYSKPNSNNLKELYKELFTKATSGHYWQTFITNSMVRAHIDADKAKEAQRASTTPSYNNDPFPTIPVKSEFAQWKKKFTDTRDSPFLFATYHPEAIKDTIMKMRENNFKLETGPNDKYGDYTAQYQGNTHMLDYYLGFYSPIFLSDGRSNVEFFTAYRDIVYNPFLDKAQGNMVWFQYHTKTDNKFKKPECHWEIKDMPLWALLNGYVDYLETQIQYGDLSKEGKVLIRCPYTKPALVDPRDDTAGYVVYNRNFGRGKWIDGGGYIPLHERTKWYVMLRYQTDVFHDIVTCGPWQYRDDNKNSQLVAKYRFSFIWGGNTVHSQVIRNPCKDNQVSGPRRQPRDIQVVDPQRITPPWVLHSFDQRRGLFTETALRRLLQEPLPGEYAVSTLRTPLLFLPSEYQREDGAAESASGSPAKRPRIWSEESQTETISSEENPAETTRELLQRKLREQRALQFQLQHFAVQLAKTQANLHVNPLLSFPQ

SEQ ID NO: 29 - protein, 204 aa, Alphatorquevirus sp.
MAWWGWRRRWWRPKRRWRWRRARRRRRVPARRPRRAFRRYRTRTVIRNPCKDNQVSGPRRQPRDIQVVDPQRITPPWVLHSFDQRRGLFTETALRRLLQEPLPGEYAVSTLRTPLLFLPSEYQREDGAAESASGSPAKRPRIWSEESQTETISSEENPAETTRELLQRKLREQRALQFQLQHFAVQLAKTQANLHVNPLLSFPQ

SEQ ID NO: 30 - protein, 119 aa, Alphatorquevirus sp.
MAWWGWRRRWWRPKRRWRWRRARRRRRVPARRPRRAFRRYRTRTNTSEKTALQKAPQVHRPKDPVSGQKRVRRRRSPRRRTRRRRRGSSSSESSESSEHSSSNSSTSRSNSPRPRRIST

SEQ ID NO: 31 - DNA, 3818 bp, Alphatorquevirus sp.
  source 1..3818: mol_type = genomic DNA
aagtccgccactaaccacgtgactcccgcaggccaacccagtactatgtcgtccacttcctgggacgagtctacgtcctgatataagtaagtgcacttccgaatggctgagttttccacgcccgtccgcagcgagaacgccacggaggggagtccgcgcgtcccgagggcgggtgccggaggtgagtttacacaccgcagtcaaggggcaattcgggctcgggactggccgggccccgggcaaggctcttaaaaaatgcactttcgcagagtgcgagcgaaaaggaaactgctactgcaagctgtgcgagctccaccgaaggcacctgccatgagcttcaccacacctactattaatgccgggatccgagagcagcaatggttcgagtccacccttagatcccaccactcgttctgtggctgtggtgatcccgtgcttcattttactaaccttgctactcgctttaactatctgcctgctacctcttcgcctctggaccctcccggcccagcgccgcgaggccgcccggcgctccgccgcctcccggcactcccttcagcccccgcgaccccttctagagaactagcatggcctactggttcagaaggtggggctggaggccgaggcgccggtggagaaggtggcgccgccgtcgaaggagactaccgagaagaagaactagacgagctgttcgcggccttggaagaagacgcaaaccaagggtaaggaggcgccgcagaactcgcagacgtacctacagacgggggtggagacgcaggaggtacataagacgggggcgacgcaaaaagaaactcatactgactcagtggaacccggcaatagttaagaggtgcaacattaagggcggacttccaataattatatgcggagagcccagggcagcctttaactatggctaccacatggaggactacactcctcaacctttccccttcggagggggaatgagcacagtgactttctctctgaaagccttgtatgaccagtacctaaaacaccaaaacaggtggactttctcaaacgaccagctagacctcgccagatacaggggctgtaaactaaggttctacagaagccccgtctgtgactttatagtacactacaacctaatacctccactaaaaatgaaccagttcacaagtcccaacacgcacccgggactactcatgctcagcaaacacaagataataattcccagctttcaaacaagacctgggggcagacgctttgttaaaataagacttaatccccccaaactatttgaagacaagtggtacactcagcaagacctgtgcaaggttccgctcgttagtattacagcaactgcggctgacttgcggtatccgttctgctcaccacaaacgaacaacccttgcaccaccttccaggtactgcgcaagaactacaatacagttataggaacttccgtaaaagaccaagagtccacacaagactttgaaaattggctttataaaacagactcacactatcaaacatttgccacagaggctcaactaggcagaattcctgcatttaatcctgatggcactaaaaacactaaacagcagtcgtggcaagataactggagcaaaaaaaattcaccatggacaggtaactcaggtacatacccacaaacaaccagtgaaatgtacaaaattccatatgacagtaacttcggctttcccacatacagagcccaaaaagactacattttagaaagaagacagtgcaactttaactatgaagttaataatccagttagcaaaaaagtatggccacaacctagtacaacaacacccacagtagactactatgaataccactgtggatggttcagcaacatattcataggccccaacagatacaacctacagtttcaaacagcatatgtagacaccacatacaacccactaatggacaagggcaaaggcaacaaaatatggtttcaatatctgtctaaaaagggcacagactacaatgaaaaacaatgctactgcaccctagaagacatgcccctatgggcaatatgctttggatacactgactatgtagagactcaactaggacccaatgtggaccatgaaacagcaggcttaataattatgatctgtccatacactcaaccacctatgtatgacaaaaacagacctaactggggatacgtagtctatgacacaaactttggcaatggaaaaatgccctcaggaagtggccaagtcccagtatactggcaatgccgatggaggcccatgctgtggttccaacaacaagtactcaatgacatctcaaagactggaccgtacgcctacagagacgaatataaaaatgtacaactgactctctactacaactttatttttaactgggggggcgacatgtattacccacaggtcgttaaaaacccctgtggagactccggaatcgttcccggttccggtagattcactcgagaagtacaagtcgttagcccgctttccatgggaccggcctacatcttccactacttcgactccagacgcgggttctttagtgaaaaagctcttaaaagaatgcaacaacaacaagaatttgatgaatcttttacattcaaacctaagagacccaaactttctacagcagccgcagaaatcctccagctcgaagaagactcgacttcaggggaaggaaaatcgccactacagcaagaagagaaagaagtcgaagtcctccaaacgccgacagtacagctccagctccagcgaaacatccaggagcagctcgcaatcaagcagcagctccaattcctcttgctccaactcctcaaaacccaatccaatttgcatttaaacccacaatttttaagcccttcataaaatatgacatgtttggggacccccttcctcaccccccaacagccgaagagtgggaaacagagtaccagtgctgtaaggcctttaacagaccacctagaaccaacctaaaagacacccccttctacccctgggtacctaaacctaaacctcaattccgtgtatcttttaaacttggttttcaataaacaaggccgtgggagtttcacttgtcggtgtcaacctcttaaggtcactaagcactccgagcgtaagcgaggagtgcgaccctcccccctggggcaactccctcgaagtccggcgctacgcgcttcgcgctgcgccggacatctcggaccccccctccacccgaaacgcttgcgcgtttcggaccttcggcgtcgggggggtcgggggctttactaaacagactccgaggtgccattggacactgaggggatgaacagcaacgaaagtgagtggggccagacttcgccataaggcctttatcttcttgccatttgtcagtatagagggtcgccataggcttcggcctccattttaacctctaaaaactaccaaaatggccgttccagtgacgtcacagccgccattttaagtagctgacgtcaaggattgacgtgaaggttaaaggtcatcctcggcggaagctacacaaaatggtggacaacatcttccgggtcaaaggtcgtgcacacgtcataagtcacgtggtggggacccgctgtaacccggaagtaggccccgtcacgtgatttgtcacgtgtgtacacgtcacaaccgccattttgttttacaaaatggctgacttccttcctcttttttaaaaaaaacggccgtgcggcggcgcgcgcgcttcgcgcgcgcgccgggggctgccgcccccccccgcgcatgcgcgcggggcccccccccgcggggggctccgccccccggcccccccccccg

SEQ ID NO: 32 - protein, 131 aa, Alphatorquevirus sp.
MSFTTPTINAGIREQQWFESTLRSHHSFCGCGDPVLHFTNLATRFNYLPATSSPLDPPGPAPRGRPALRRLPALPSAPATPSRELAWPTGSEGGAGGRGAGGEGGAAVEGDYREEELDELFAALEEDANQG

SEQ ID NO: 33 - protein, 275 aa, Alphatorquevirus sp.
MSFTTPTINAGIREQQWFESTLRSHHSFCGCGDPVLHFTNLATRFNYLPATSSPLDPPGPAPRGRPALRRLPALPSAPATPSRELAWPTGSEGGAGGRGAGGEGGAAVEGDYREEELDELFAALEEDANQGSLKTPVETPESFPVPVDSLEKYKSLARFPWDRPTSSTTSTPDAGSLVKKLLKECNNNKNLMNLLHSNLRDPNFLQQPQKSSSSKKTRLQGKENRHYSKKRKKSKSSKRRQYSSSSSETSRSSSQSSSSSNSSCSNSSKPNPICI

SEQ ID NO: 34 - protein, 270 aa, Alphatorquevirus sp.
MSFTTPTINAGIREQQWFESTLRSHHSFCGCGDPVLHFTNLATRFNYLPATSSPLDPPGPAPRGRPALRRLPALPSAPATPSRELAWPTGSEGGAGGRGAGGEGGAAVEGDYREEELDELFAALEEDANQGSRRNPPARRRLDFRGRKIATTARRERSRSPPNADSTAPAPAKHPGAARNQAAAPIPLAPTPQNPIQFAFKPTIFKPFIKYDMFGDPLPHPPTAEEWETEYQCCKAFNRPPRTNLKDTPFYPWVPKPKPQFRVSFKLGFQ

SEQ ID NO: 35 - protein, 156 aa, Alphatorquevirus sp.
MSFTTPTINAGIREQQCSRRNPPARRRLDFRGRKIATTARRERSRSPPNADSTAPAPAKHPGAARNQAAAPIPLAPTPQNPIQFAFKPTIFKPFIKYDMFGDPLPHPPTAEEWETEYQCCKAFNRPPRTNLKDTPFYPWVPKPKPQFRVSFKLGFQ

SEQ ID NO: 36 - protein, 761 aa, Alphatorquevirus sp.
MAYWFRRWGWRPRRRWRRWRRRRRRLPRRRTRRAVRGLGRRRKPRVRRRRRTRRRTYRRGWRRRRYIRRGRRKKKLILTQWNPAIVKRCNIKGGLPIIICGEPRAAFNYGYHMEDYTPQPFPFGGGMSTVTFSLKALYDQYLKHQNRWTFSNDQLDLARYRGCKLRFYRSPVCDFIVHYNLIPPLKMNQFTSPNTHPGLLMLSKHKIIIPSFQTRPGGRRFVKIRLNPPKLFEDKWYTQQDLCKVPLVSITATAADLRYPFCSPQTNNPCTTFQVLRKNYNTVIGTSVKDQESTQDFENWLYKTDSHYQTFATEAQLGRIPAFNPDGTKNTKQQSWQDNWSKKNSPWTGNSGTYPQTTSEMYKIPYDSNFGFPTYRAQKDYILERRQCNFNYEVNNPVSKKVWPQPSTTTPTVDYYEYHCGWFSNIFIGPNRYNLQFQTAYVDTTYNPLMDKGKGNKIWFQYLSKKGTDYNEKQCYCTLEDMPLWAICFGYTDYVETQLGPNVDHETAGLIIMICPYTQPPMYDKNRPNWGYVVYDTNFGNGKMPSGSGQVPVYWQCRWRPMLWFQQQVLNDISKTGPYAYRDEYKNVQLTLYYNFIFNWGGDMYYPQVVKNPCGDSGIVPGSGRFTREVQVVSPLSMGPAYIFHYFDSRRGFFSEKALKRMQQQQEFDESFTFKPKRPKLSTAAAEILQLEEDSTSGEGKSPLQQEEKEVEVLQTPTVQLQLQRNIQEQLAIKQQLQFLLLQLLKTQSNLHLNPQFLSPS

SEQ ID NO: 37 - protein, 198 aa, Alphatorquevirus sp.
MAYWFRRWGWRPRRRWRRWRRRRRRLPRRRTRRAVRGLGRRRKPRVVKNPCGDSGIVPGSGRFTREVQVVSPLSMGPAYIFHYFDSRRGFFSEKALKRMQQQQEFDESFTFKPKRPKLSTAAAEILQLEEDSTSGEGKSPLQQEEKEVEVLQTPTVQLQLQRNIQEQLAIKQQLQFLLLQLLKTQSNLHLNPQFLSPS

SEQ ID NO: 38 - protein, 114 aa, Alphatorquevirus sp.
MAYWFRRWGWRPRRRWRRWRRRRRRLPRRRTRRAVRGLGRRRKPRQPQKSSSSKKTRLQGKENRHYSKKRKKSKSSKRRQYSSSSSETSRSSSQSSSSSNSSCSNSSKPNPICI

SEQ ID NO: 39 - DNA, 3794 bp, Alphatorquevirus sp.
  source 1..3794: mol_type = genomic DNA
cccgaagtccgtcactaaccacgtgactcctgtcgcccaatcagagtgtatgtcgtgcatttcctgggcatggtctacatcctgatataactaagtgcacttccgaatggctgagttttccacgcccgtccgcagcgagggagcgacggaggagctcccgagcgtcccgagggcgggtgccggaggtgagtttacacaccgcagtcaaggggcaattcgggctcgggactggccgggctatgggcaaggctcttagggtcttcattcttaatatgtttcttggcagagtttaccgccacaagaaaaggaaagtgctactgtccacactgcgagctccacaggcgtctcgcagggctatgagttggcgacccccggtacacgatgcacccggcatcgagcgcaattggtacgaggcctgtttcagagcccacgctggagcttgtggctgtggcaattttattatgcaccttaatcttttggctgggcgttatggttttactccggggtcagcgccgccaggtggtcctcctccgggcaccccgcagataaggagagccaggcctagtcccgccgcaccagagcagcccgctgccctaccatggcatggggatggtggagatggcggcgccgctggcccgccagacgctggaggagacgccgtcgccggcgccccgtacggagaacaagagctcgccgacctgctcgacgctatagaagacgacgaacagtaagaaccaggcgaaggcggtgggggcgcagacggtacagacggggctggagacgcaggacttatgtgagaaaggggcgacacagaaaaaagaaaaagagactgatactgagacagtggcaaccagccacaagacgcagatgtaccataactgggtacctgcccatagtgttctgcggccacactaggggcaataaaaactatgcactacactctgacgactacaccccccaaggacaaccatttggaggggctctaagcactacctcattctctttaaaagtactatttgaccagcatcagagaggactaaacaagtggtcttttccaaacgaccaactagacctcgccagatatagaggctgcaaatttatattttatagaacaaaacaaactgactgggtgggccagtatgacatatcagaaccctacaagctagacaaatacagctgccccaactatcaccctggaaacatgattaaggcaaagcacaaatttttaataccaagctatgacactaatcctagaggcagacaaaaaattatagttaaaattccccccccagacctctttgtagacaagtggtacactcaagaggatctgtgttccgttaatcttgtgtcacttgcggtttctgcggcttcctttctccacccattcggctcaccacaaactgacaacccttgctacaccttccaggtgttgaaagagttctactatcaggcaataggcttctctgcaagcacacaagcaatgacatcagtattagacacgctatacacacaaaacagttattgggaatctaatctaactcagttttatgtacttaatgcaaaaaaaggcagtgatacaacacagcctttaactagcaatatgccaactcgtgaagagtttatggcaaaaaaaaataccaattacaactggtatacatacaaggccgcgtcagtaaaaaataaactacatcaaatgagacaaacctattttgaggagttaacctctaaggggccacaaacaacaaaaagtgaggaaggctacagtcagcactggaccaccccctccacaaacgcctacgaatatcacttaggaatgtttagtgcaatatttctagccccagacaggccagtacctagatttccatgcgcctaccaagatgtaacttacaaccccttaatggacaaaggggtgggaaaccacatttggtttcagtacaacacaaaggcagacactcagctaatagtcacaggagggtcctgcaaagcacacatacaagacataccactgtgggcggccttctatggatacagtgactttatagagtcagaactaggcccctttgtagatgcagagacggtaggcttagtgtgtgtaatatgcccttatacaaaaccccccatgtacaacaagacaaaccccgccatgggctacgtgttctatgacagaaactttggtgacggaaaatggactgacggacggggcaaaatagagccctactggcaagttaggtggaggcccgaaatgcttttccaagaaactgtaatggcagacctagttcagactgggccctttagctacaaagacgaacttaaaaacagcaccctagtgtgcaagtacaaattctatttcacctggggaggtaacatgatgttccaacagacgatcaaaaacccgtgcaagacggacggacaacccaccgactccagtagacaccctagaggaatacaagtggcggacccggaacaaatgggaccccgctgggtgttccactcctttgactggcgaaggggctatcttagcgagaaagctctcaaacgcctgcaagaaaaacctcttgactatgacgaatattttacacaaccaaaaagacctagaatctttcctccaacagaatcagcagagggagagttccgagagcccgaaaaaggctcgtattcagaggaagaaaggtcgcaagcctctgccgaagagcagacgcaggaggcgacagtactcctcctcaagcgacgactcagagagcaacagcagctccagcagcagctccaattcctcacccgagaaatgttcaaaacgcaagcgggtctccacctaaaccctatgttattaaaccagcgataaaccaagtgtacctgtttccagagagggccccaaaaccccctcctagcagccaagactggcagcaggagtacgaggcctgcgcagcctgggacaggccccctagatacaatctgtcctctcctcctttctaccccagctgcccttcaaaattctgtgtaaaattcagccttggctttaaataaatggcaactttactgtgcaaggccgtgggagtttcactggtcggtgtctacctctaaaggtcactaagcactccgagcgttagcgaggagtgcgacccttccccctgactcaacttcttcggagccgcgcgctacgccttcggctgcgcgcggcacctcagacccccgctcgtgctgacacgctcgcgcgtgtcagaccacttcgggctcgcgggggtcgggaattttgctaaacagactccgagttgctcttggacactgagggggcatatcagtaacgaaagtgagtggggccagacttcgccataaggcctttatcttcttgccattggatagtatcgagggttgccataggcttcgacctccattttaggccttccggactacaaaaatggccgttttagtgacgtcacggccgccattttaagtaaggcggaagcagctcggcgtacacaaaatggcggcggagcacttccggcttgcccaaaatggtgggcaacttcttccgggtcaaaggtcacagctacgtcacaagtcacgtggggagggttggcgtttaacccggaagccaatcctcttacgtggcctgtcacgtgacttgtacgtcacgaccaccattttgttttacaaaatggccgacttccttcctcttttttaaaaataacggttcggcggcggcgcgcgcgctacgcgcgcgcgccggggggctgccgccccccccccgcgcatgcgcggggcccccccccgcggggggctccgccccccggcccccc

SEQ ID NO: 40 - protein, 124 aa, Alphatorquevirus sp.
MSWRPPVHDAPGIERNWYEACFRAHAGACGCGNFIMHLNLLAGRYGFTPGSAPPGGPPPGTPQIRRARPSPAAPEQPAALPWHGDGGDGGAAGPPDAGGDAVAGAPYGEQELADLLDAIEDDEQ

SEQ ID NO: 41 - protein, 267 aa, Alphatorquevirus sp.
MSWRPPVHDAPGIERNWYEACFRAHAGACGCGNFIMHLNLLAGRYGFTPGSAPPGGPPPGTPQIRRARPSPAAPEQPAALPWHGDGGDGGAAGPPDAGGDAVAGAPYGEQELADLLDAIEDDEQRSKTRARRTDNPPTPVDTLEEYKWRTRNKWDPAGCSTPLTGEGAILARKLSNACKKNLLTMTNILHNQKDLESFLQQNQQRESSESPKKARIQRKKGRKPLPKSRRRRRQYSSSSDDSESNSSSSSSSNSSPEKCSKRKRVST

SEQ ID NO: 42 - protein, 257 aa, Alphatorquevirus sp.
MSWRPPVHDAPGIERNWYEACFRAHAGACGCGNFIMHLNLLAGRYGFTPGSAPPGGPPPGTPQIRRARPSPAAPEQPAALPWHGDGGDGGAAGPPDAGGDAVAGAPYGEQELADLLDAIEDDEHRGRVPRARKRLVFRGRKVASLCRRADAGGDSTPPQATTQRATAAPAAAPIPHPRNVQNASGSPPKPYVIKPAINQVYLFPERAPKPPPSSQDWQQEYEACAAWDRPPRYNLSSPPFYPSCPSKFCVKFSLGFK

SEQ ID NO: 43 - protein, 150 aa, Alphatorquevirus sp.
MSWRPPVHDAPGIERNCRGRVPRARKRLVFRGRKVASLCRRADAGGDSTPPQATTQRATAAPAAAPIPHPRNVQNASGSPPKPYVIKPAINQVYLFPERAPKPPPSSQDWQQEYEACAAWDRPPRYNLSSPPFYPSCPSKFCVKFSLGFK

SEQ ID NO: 44 - protein, 746 aa, Alphatorquevirus sp.
MAWGWWRWRRRWPARRWRRRRRRRPVRRTRARRPARRYRRRRTVRTRRRRWGRRRYRRGWRRRTYVRKGRHRKKKKRLILRQWQPATRRRCTITGYLPIVFCGHTRGNKNYALHSDDYTPQGQPFGGALSTTSFSLKVLFDQHQRGLNKWSFPNDQLDLARYRGCKFIFYRTKQTDWVGQYDISEPYKLDKYSCPNYHPGNMIKAKHKFLIPSYDTNPRGRQKIIVKIPPPDLFVDKWYTQEDLCSVNLVSLAVSAASFLHPFGSPQTDNPCYTFQVLKEFYYQAIGFSASTQAMTSVLDTLYTQNSYWESNLTQFYVLNAKKGSDTTQPLTSNMPTREEFMAKKNTNYNWYTYKAASVKNKLHQMRQTYFEELTSKGPQTTKSEEGYSQHWTTPSTNAYEYHLGMFSAIFLAPDRPVPRFPCAYQDVTYNPLMDKGVGNHIWFQYNTKADTQLIVTGGSCKAHIQDIPLWAAFYGYSDFIESELGPFVDAETVGLVCVICPYTKPPMYNKTNPAMGYVFYDRNFGDGKWTDGRGKIEPYWQVRWRPEMLFQETVMADLVQTGPFSYKDELKNSTLVCKYKFYFTWGGNMMFQQTIKNPCKTDGQPTDSSRHPRGIQVADPEQMGPRWVFHSFDWRRGYLSEKALKRLQEKPLDYDEYFTQPKRPRIFPPTESAEGEFREPEKGSYSEEERSQASAEEQTQEATVLLLKRRLREQQQLQQQLQFLTREMFKTQAGLHLNPMLLNQR

SEQ ID NO: 45 - protein, 195 aa, Alphatorquevirus sp.
MAWGWWRWRRRWPARRWRRRRRRRPVRRTRARRPARRYRRRRTTIKNPCKTDGQPTDSSRHPRGIQVADPEQMGPRWVFHSFDWRRGYLSEKALKRLQEKPLDYDEYFTQPKRPRIFPPTESAEGEFREPEKGSYSEEERSQASAEEQTQEATVLLLKRRLREQQQLQQQLQFLTREMFKTQAGLHLNPMLLNQR

SEQ ID NO: 46 - protein, 107 aa, Alphatorquevirus sp.
MAWGWWRWRRRWPARRWRRRRRRRPVRRTRARRPARRYRRRRTQRESSESPKKARIQRKKGRKPLPKSRRRRRQYSSSSDDSESNSSSSSSSNSSPEKCSKRKRVST

SEQ ID NO: 47 - DNA, 3866 bp, Alphatorquevirus sp.
  source 1..3866: mol_type = genomic DNA
aagtccgtcactaaccacgtgactcccgcaggccaatcagagtctatgtcgtgcacttcctgggcatggtctacgttctcatataactaactgcacttccgaatggctgagttttccacgcccgtccgcagcggcagcaccacggagggtgatccccgcgtcccgagggcgggtgccgaaggtgagtttacacaccgcagtcaaggggcaattcgggctcgggactggccgggctatgggcaaggctcttagggctttcattgttaaaaatgtttctcggcaggccttacaggagaaagaaaagggcgctgtcactgcctggcgtgcgagctgcacaggcgaaacaacctggtgatatgagctggagccgtccagtacataatgccgccgggatcgaaaggcagtggttcgaatccacctttagatcccacgctagttgctgtggctgcggcaattttgttaatcatattaatgtactggctgctcgctacggctttactggggggccgacgccgccaggtggtcctgggccgcgtccacaactgaggcccgcgcttcccgcgccggaccccgacccccaggcgcccaaccgtgagccatggcgtggagctggtggtggcaacgatggagaaggcgccgctggaaacccaggaggcgccgctggagacgtctacgatggagaagacctagacgcgctgttcgccgccgtcgtcgaggacgtagagtaaggaggcggaggtgggcgcgtagacgggggcgacgcagacggtacgccaccagacgaaagagacgttataggggtcgccgctttaaaaagaaactagtactgactcagtggcaccctaataccatgagacgctgcttaatcaagggcatagtccccctggtaatatgcggccacaccaggtggaactacaactacgccctccatagcaaggactacacagaggagggtcgctaccctcacgggggggccctcagcaccactacgtggtcccttaaggtgctgtatgacgagcacctcaaacaccacgacttctggggctatcccaacaaccagctagacctggccaggtacaagggggccaagttcaccttctacagacacaaaaagactgactttataatattctttaacagaaagcctccctttaagctaaacaagtacagctgtgcctcctatcacccaggcatgctgatgcagcagagacacaagatcctgctacccagctacgaaactaaacccaagggcaggccaaagataacagttagaataaagccccccactctgttagaggacaagtggtacacccagcaggacctgtgcgacgttaacctgttgcaacttgtggtcactgcggctgactttcgacatccactctgctcaccacaaacgaacactccaaccacaaccttccaggtgttgaaagacatctattatgacactatgagcatatctgaacccacagactcctacactagtgttaacaataaaagtacaacacaaacttttactaactactcaaacaccttagaaaacattctgtacacacgagcctcctactggaactcgttccacgccactgaatacctaaaccccaacatcatatacaaaaacggtgaaaaactattcaaagaacatgaagacttaataacctggatgacccaaactaacaataccgggtttctaactaaaaacaacacagcttttggcaacaacagctacaggcccaatgcagacaaaattaaaaaagccagaaagacatactggaacgccctaataggcaccaacgacctggccactaatataggccaggccagagcagaaaggttcgagtaccacctaggctggtactcccccatatttctcagcagacacaggagcaacatgaactttgccagggcctaccaagacgtcacatacaaccccaactgtgacaggggagttaacaacagggtgtgggttcagcctctaactaaacccaccacagagttcgacgagaaaaggtgtaagtgcgtagtgcagcacctgcctctgtgggcggctctgtactgctaccaagactttgtagaggaggagctggggtcctcctcagagatattaaattcatgcctactggtattacagtgcccttacacctttcccccaatgtatgacaaaaagctaccagacaagggattcgtgttttatgactccctttttggagacggcaaaatgtctgacggacgcggacaggtggacattttctggcaacagcgatggtaccctcgcttagccactcagatgcaagtcatgcacgacatcaccatgacgggccccttctcctaccgagacgagctagttagcacccaactgactgccaagtacacctttgactttatgtggggcggaaatatgatctccacacagatcatcaagaacccctgcaaagacagtggactggaacccgcctaccccggtagacagcgtcgcgacttacaaattgttgacccatactccatgggcccccaattctcgttccacaactgggactacagacatggcctttttggccaagacgctatcgacagagtgtctaaacaaccaaaagatgatgcagactatcctaacccatacaaaaggcctagatattttccacccacagaccaagccgcccaagagcaagaaaaagacttcagtttcctcaaaacagcaccgtcgaactcagaagagagcgatcaagaagtcctccaagaaacgcaagtactccgattccagccagagcagcacaagcaactccacctgcagctcgcagagcggcagcgaatcggagagcaactccgatacctactccaacagatgttcaaaactcaggccaatctccacctaaacccatatacatttacccagctgtaaagcaggtgtttatgtttgaccccccgggccctaaggctatctcgggcgccaaggcctgggaggacgagttcctcaccgcaaaagtgtggaaccgcccggtacgcaagtactactcagacaccccctactacccctgggcccccaaaccccagtactctgtcagtttcaaactcggctggaaataaaaaaagcctgctccactgtactaggccgtgggagtttcactcgtcggtgtctacctcttaaggtcaccaagcactccgagcgtcagcgaggagtgcgacccttgggggtgggtgcaacgccctcggcggccgcgcgctacgccttcggctgcgcgcggcacctcggacccccgctcgtgctgacgcgcttgcgcgcgtcagaccacttcgggctcgcgggggtcggaaattttgctaaacagactccgagttgccattggacactggagccgtgaatcagtaacgaaagtgagtggggccagacttcgccataaggcctttatctttttgccatttgtccgtggggaagggtcgctgcaagcgcggaccccgttttcaccccttccggactacaaaaatagcgcattagtgacgtcacggccgccattttaagtaaggcggaagcaactccactttctcacaaaatggcggcggagcacttccggcttgcccaaaatggccgccaaaaacatccgggtcaaagttcgccgctacgtcataagtcacgtgactggggaggtacttaaacacggaagtatcctcaaccacgtaactggtcacgtggtgcgcacgtcacggcaaccattttgttttacaaaatggcgcatttccttcctcttttttaaaaattaaccgttggcggcggcgcgcgcgctacgcgcgcgcgccggggagctctgcccccccccgcgcatgcgcgcgggtcccccccccgcggggggctccgccccccggtcccccccccg

SEQ ID NO: 48 - protein, 123 aa, Alphatorquevirus sp.
MSWSRPVHNAAGIERQWFESTFRSHASCCGCGNFVNHINVLAARYGFTGGPTPPGGPGPRPQLRPALPAPDPDPQAPNREPWRGAGGGNDGEGAAGNPGGAAGDVYDGEDLDALFAAVVEDVE

SEQ ID NO: 49 - protein, 275 aa, Alphatorquevirus sp.
MSWSRPVHNAAGIERQWFESTFRSHASCCGCGNFVNHINVLAARYGFTGGPTPPGGPGPRPQLRPALPAPDPDPQAPNREPWRGAGGGNDGEGAAGNPGGAAGDVYDGEDLDALFAAVVEDVESSRTPAKTVDWNPPTPVDSVATYKLLTHTPWAPNSRSTTGTTDMAFLAKTLSTECLNNQKMMQTILTHTKGLDIFHPQTKPPKSKKKTSVSSKQHRRTQKRAIKKSSKKRKYSDSSQSSTSNSTCSSQSGSESESNSDTYSNRCSKLRPIST

SEQ ID NO: 50 - protein, 267 aa, Alphatorquevirus sp.
MSWSRPVHNAAGIERQWFESTFRSHASCCGCGNFVNHINVLAARYGFTGGPTPPGGPGPRPQLRPALPAPDPDPQAPNREPWRGAGGGNDGEGAAGNPGGAAGDVYDGEDLDALFAAVVEDVEPSRPRARKRLQFPQNSTVELRRERSRSPPRNASTPIPARAAQATPPAARRAAANRRATPIPTPTDVQNSGQSPPKPIYIYPAVKQVFMFDPPGPKAISGAKAWEDEFLTAKVWNRPVRKYYSDTPYYPWAPKPQYSVSFKLGWK

SEQ ID NO: 51 - protein, 765 aa, Alphatorquevirus sp.
MAWSWWWQRWRRRRWKPRRRRWRRLRWRRPRRAVRRRRRGRRVRRRRWARRRGRRRRYATRRKRRYRGRRFKKKLVLTQWHPNTMRRCLIKGIVPLVICGHTRWNYNYALHSKDYTEEGRYPHGGALSTTTWSLKVLYDEHLKHHDFWGYPNNQLDLARYKGAKFTFYRHKKTDFIIFFNRKPPFKLNKYSCASYHPGMLMQQRHKILLPSYETKPKGRPKITVRIKPPTLLEDKWYTQQDLCDVNLLQLVVTAADFRHPLCSPQTNTPTTTFQVLKDIYYDTMSISEPTDSYTSVNNKSTTQTFTNYSNTLENILYTRASYWNSFHATEYLNPNIIYKNGEKLFKEHEDLITWMTQTNNTGFLTKNNTAFGNNSYRPNADKIKKARKTYWNALIGTNDLATNIGQARAERFEYHLGWYSPIFLSRHRSNMNFARAYQDVTYNPNCDRGVNNRVWVQPLTKPTTEFDEKRCKCVVQHLPLWAALYCYQDFVEEELGSSSEILNSCLLVLQCPYTFPPMYDKKLPDKGFVFYDSLFGDGKMSDGRGQVDIFWQQRWYPRLATQMQVMHDITMTGPFSYRDELVSTQLTAKYTFDFMWGGNMISTQIIKNPCKDSGLEPAYPGRQRRDLQIVDPYSMGPQFSFHNWDYRHGLFGQDAIDRVSKQPKDDADYPNPYKRPRYFPPTDQAAQEQEKDFSFLKTAPSNSEESDQEVLQETQVLRFQPEQHKQLHLQLAERQRIGEQLRYLLQQMFKTQANLHLNPYTFTQL

SEQ ID NO: 52 - protein, 203 aa, Alphatorquevirus sp.
MAWSWWWQRWRRRRWKPRRRRWRRLRWRRPRRAVRRRRRGRRIIKNPCKDSGLEPAYPGRQRRDLQIVDPYSMGPQFSFHNWDYRHGLFGQDAIDRVSKQPKDDADYPNPYKRPRYFPPTDQAAQEQEKDFSFLKTAPSNSEESDQEVLQETQVLRFQPEQHKQLHLQLAERQRIGEQLRYLLQQMFKTQANLHLNPYTFTQL

SEQ ID NO: 53 - protein, 116 aa, Alphatorquevirus sp.
MAWSWWWQRWRRRRWKPRRRRWRRLRWRRPRRAVRRRRRGRRTKPPKSKKKTSVSSKQHRRTQKRAIKKSSKKRKYSDSSQSSTSNSTCSSQSGSESESNSDTYSNRCSKLRPIST

SEQ ID NO: 54 - DNA, 2979 bp, Betatorquevirus sp.
  source 1..2979: mol_type = genomic DNA
taataaatattcaacaggaaaaccacctaatttaaattgccgaccacaaaccgtcacttagttcccctttttgcaacaacttctgcttttttccaactgccggaaaaccacataatttgcatggctaaccacaaactgatatgctaattaacttccacaaaacaacttccccttttaaaaccacacctacaaattaattattaaacacagtcacatcctgggaggtactaccacactataataccaagtgcacttccgaatggctgagtttatgccgctagacggagaacgcatcagttactgactgcggactgaacttgggcgggtgccgaaggtgagtgaaaccaccgaagtcaaggggcaattcgggctagttcagtctagcggaacgggcaagaaacttaaaattattttatttttcagatgagcgactgctttaaaccaacatgctacaacaacaaaacaaagcaaactcactggattaataacctgcatttaacccacgacctgatctgcttctgcccaacaccaactagacacttattactagctttagcagaacaacaagaaacaattgaagtgtctaaacaagaaaaagaaaaaataacaagatgccttattactacagaagaagacggtacaactacagacgtcctagatggtatggacgaggttggattagacgcccttttcgcagaagatttcgaagaaaaagaagggtaagacctacttatactactattcctctaaagcaatggcaaccgccatataaaagaacatgctatataaaaggacaagactgtttaatatactatagcaacttaagactgggaatgaatagtacaatgtatgaaaaaagtattgtacctgtacattggccgggagggggttctttttctgtaagcatgttaactttagatgccttgtatgatatacataaactttgtagaaactggtggacatccacaaaccaagacttaccactagtaagatataaaggatgcaaaataacattttatcaaagcacatttacagactacatagtaagaatacatacagaactaccagctaacagtaacaaactaacatacccaaacacacatccactaatgatgatgatgtctaagtacaaacacattatacctagtagacaaacaagaagaaaaaagaaaccatacacaaaaatatttgtaaaaccacctccgcaatttgaaaacaaatggtactttgctacagacctctacaaaattccattactacaaatacactgcacagcatgcaacttacaaaacccatttgtaaaaccagacaaattatcaaacaatgttacattatggtcactaaacaccataagcatacaaaatagaaacatgtcagtggatcaaggacaatcatggccatttaaaatactaggaacacaaagcttttatttttacttttacaccggagcaaacctaccaggtgacacaacacaaataccagtagcagacctattaccactaacaaacccaagaataaacagaccaggacaatcactaaatgaggcaaaaattacagaccatattactttcacagaatacaaaaacaaatttacaaattattggggtaacccatttaataaacacattcaagaacacctagatatgatactatactcactaaaaagtccagaagcaataaaaaacgaatggacaacagaaaacatgaaatggaaccaattaaacaatgcaggaacaatggcattaacaccatttaacgagccaatattcacacaaatacaatataacccagatagagacacaggagaagacactcaattatacctactctctaacgctacaggaacaggatgggacccaccaggaattccagaattaatactagaaggatttccactatggttaatatattggggatttgcagactttcaaaaaaacctaaaaaaagtaacaaacatagacacaaattacatgttagtagcaaaaacaaaatttacacaaaaacctggcacattctacttagtaatactaaatgacacctttgtagaaggcaatagcccatatgaaaaacaacctttacctgaagacaacattaaatggtacccacaagtacaataccaattagaagcacaaaacaaactactacaaactgggccatttacaccaaacatacaaggacaactatcagacaatatatcaatgttttataaattttactttaaatggggaggaagcccaccaaaagcaattaatgttgaaaatcctgcccaccagattcaatatcccataccccgtaacgagcatgaaacaacttcgttacagagtccaggggaagccccagaatccatcttatactccttcgactatagacacgggaactacacaacaacagctttgtcacgaattagccaagactgggcacttaaagacactgtttctaaaattacagagccagatcgacagcaactgctcaaacaagccctcgaatgcctgcaaatctcggaagaaacgcaggagaaaaaagaaaaagaagtacagcagctcatcagcaacctcagacagcagcagcagctgtacagagagcgaataatatcattattaaaggaccaataacttttaactgtgtaaaaaaggtgaaattgtttgatgataaaccaaaaaaccgtagatttacacctgaggaatttgaaactgagttacaaatagcaaaatggttaaagagacccccaagatcctttgtaaatgatcctcccttttacccatggttaccacctgaacctgttgtaaactttaagcttaattttactgaataaaggccagcattaattcacttaaggagtctgtttatttaagttaaaccttaataaacggtcaccgcctccctaatacgcaggcgcagaaagggggctccgccccctttaacccccagggggctccgccccctgaaacccccaagggggctacgcccccttacaccccc

SEQ ID NO: 55 - protein, 99 aa, Betatorquevirus sp.
MSDCFKPTCYNNKTKQTHWINNLHLTHDLICFCPTPTRHLLLALAEQQETIEVSKQEKEKITRCLITTEEDGTTTDVLDGMDEVGLDALFAEDFEEKEG

SEQ ID NO: 56 - protein, 203 aa, Betatorquevirus sp.
MSDCFKPTCYNNKTKQTHWINNLHLTHDLICFCPTPTRHLLLALAEQQETIEVSKQEKEKITRCLITTEEDGTTTDVLDGMDEVGLDALFAEDFEEKEGFNIPYPVTSMKQLRYRVQGKPQNPSYTPSTIDTGTTQQQLCHELAKTGHLKTLFLKLQSQIDSNCSNKPSNACKSRKKRRRKKKKKYSSSSATSDSSSSCTESE

SEQ ID NO: 57 - protein, 219 aa, Betatorquevirus sp.
MSDCFKPTCYNNKTKQTHWINNLHLTHDLICFCPTPTRHLLLALAEQQETIEVSKQEKEKITRCLITTEEDGTTTDVLDGMDEVGLDALFAEDFEEKEGARSTATAQTSPRMPANLGRNAGEKRKRSTAAHQQPQTAAAAVQRANNIIIKGPITFNCVKKVKLFDDKPKNRRFTPEEFETELQIAKWLKRPPRSFVNDPPFYPWLPPEPVVNFKLNFTE

SEQ ID NO: 58 - protein, 666 aa, Betatorquevirus sp.
MPYYYRRRRYNYRRPRWYGRGWIRRPFRRRFRRKRRVRPTYTTIPLKQWQPPYKRTCYIKGQDCLIYYSNLRLGMNSTMYEKSIVPVHWPGGGSFSVSMLTLDALYDIHKLCRNWWTSTNQDLPLVRYKGCKITFYQSTFTDYIVRIHTELPANSNKLTYPNTHPLMMMMSKYKHIIPSRQTRRKKKPYTKIFVKPPPQFENKWYFATDLYKIPLLQIHCTACNLQNPFVKPDKLSNNVTLWSLNTISIQNRNMSVDQGQSWPFKILGTQSFYFYFYTGANLPGDTTQIPVADLLPLTNPRINRPGQSLNEAKITDHITFTEYKNKFTNYWGNPFNKHIQEHLDMILYSLKSPEAIKNEWTTENMKWNQLNNAGTMALTPFNEPIFTQIQYNPDRDTGEDTQLYLLSNATGTGWDPPGIPELILEGFPLWLIYWGFADFQKNLKKVTNIDTNYMLVAKTKFTQKPGTFYLVILNDTFVEGNSPYEKQPLPEDNIKWYPQVQYQLEAQNKLLQTGPFTPNIQGQLSDNISMFYKFYFKWGGSPPKAINVENPAHQIQYPIPRNEHETTSLQSPGEAPESILYSFDYRHGNYTTTALSRISQDWALKDTVSKITEPDRQQLLKQALECLQISEETQEKKEKEVQQLISNLRQQQQLYRERIISLLKDQ

SEQ ID NO: 59 - protein, 148 aa, synthetic construct
MPYYYRRRRYNYRRPRWYGRGWIRRPFRRRFRRKRRIQYPIPRNEHETTSLQSPGEAPESILYSFDYRHGNYTTTALSRISQDWALKDTVSKITEPDRQQLLKQALECLQISEETQEKKEKEVQQLISNLRQQQQLYRERIISLLKDQ

SEQ ID NO: 60 - protein, 82 aa, Betatorquevirus sp.
MPYYYRRRRYNYRRPRWYGRGWIRRPFRRRFRRKRRSQIDSNCSNKPSNACKSRKKRRRKKKKKYSSSSATSDSSSSCTESE

SEQ ID NO: 61 - DNA, 3242 bp, Gammatorquevirus sp.
  source 1..3242: mol_type = genomic DNA
aggtggagactcttaagctatataaccaagtggggtggcgaatggctgagtttaccccgctagacggtgcagggaccggatcgagcgcagcgaggaggtccccggctgcccgtgggcgggagcccgaggtgagtgaaaccaccgaggtctaggggcaattcgggctagggcagtctagcggaacgggcaagaaacttaaaaatatttcttttacagatgcaaaacctatcagccaaagacttctacaaaccatgcagatacaactgtgaaactaaaaaccaaatgtggatgtctggcattgctgactcccatgacagttggtgtgactgtgatactccttttgctcacctcctggctagtatttttcctcctggtcacacagatcgcacacgaaccatccaagaaatacttaccagagattttaggaaaacatgcctttctggtggggccgacgcaacaaattctggtatggccgaaactatagaagaaaaaagagaagatttccaaaaagaagaaaaagaagattttacagaagaacaaaatatagaagacctgctcgccgccgtcgcagacgcagaaggaaggtaagaagaaaaaaaaaaactcttatagtaagacaatggcagccagactctattgtactctgtaaaattaaagggtatgactctataatatggggagctgaaggcacacagtttcaatgttctacacatgaaatgtatgaatatacaagacaaaagtaccctgggggaggaggatttggtgtacaactttacagcttagagtatttgtatgaccaatggaaacttagaaataatatatggactaaaacaaatcaactcaaagatttgtgtagatacttaaaatgtgttatgaccttttacagacaccaacacatagattttgtaattgtatatgaaagacaacccccatttgaaatagataaactaacatacatgaaatatcatccatatatgttattacaaagaaagcataaaataattttacctagtcaaacaactaatcctagaggtaaattaaaaaaaaagaaaactattaaacctcccaaacaaatgctcagcaaatggttttttcaacaacaatttgctaaatatgatctactacttattgctgcagcagcatgtagtttaagataccctagaataggctgctgcaatgaaaatagaatgataaccttatactgtttaaatactaaattttatcaagatacagaatggggaactacaaaacaggccccccactactttaaaccatatgcaacaattaataaatccatgatatttgtctctaactatggaggtaaaaaaacagaatataacataggccaatggatagaaacagatatacctggagaaggtaatctagcaagatactacagatcaataagtaaagaaggaggttacttttcacctaaaatactgcaagcatatcaaacaaaagtaaagtctgtagactacaaacctttaccaattgttttaggtagatataacccagcaatagatgatggaaaaggcaacaaaatttacttacaaactataatgaatggccattggggcctacctcaaaaaacaccagattatataatagaagaggtccctctttggctaggcttctggggatactataactacttaaaacaaacaagaactgaagctatatttccactacacatgtttgtagtgcaaagcaaatacattcaaacacaacaaacagaaacacctaacaatttttgggcatttatagacaacagctttatacagggcaaaaacccatgggactcagttattacttactcagaacaaaagctatggtttcctacagttgcatggcaactaaaaaccataaatgctatttgtgaaagtggaccatatgtacctaaactagacaatcaaacatatagtacctgggaactagcaactcattactcatttcactttaaatggggtggtccacagatatcagaccaaccagttgaagacccaggaaacaaaaacaaatatgatgtgcccgatacaatcaaagaagcattacaaattgttaacccagcaaaaaacattgctgccacgatgttccatgactgggactacagacggggttgcattacatcaacagctattaaaagaatgcaacaaaacctcccaactgattcatctctcgaatctgattcagactcagaaccagcacccaagaaaaaaagactactaccagtcctccacgacccacaaaagaaaacggaaaagatcaaccaatgtctcctctctctctgcgaagaaagtacatgccaggagcaggaaacggaggaaaacatcctcaagctcatccagcagcagcagcagcagcagcagaaactcaagcacaacctcttagtactaatcaaggacttaaaagtgaaacaaagattattacaactacaaacgggggtactagaataacccttaccagatttaaaccaggatttgagcaagaaactgaaaaagagttagcacaagcatttaacagaccccctagactgttcaaagaagataaacccttttacccctggctacccagatttacaccccttgtaaactttcaccttaattttaaaggctaggcctacactgctcacttagtggtgtatgtttattaaagtttgcaccccagaaaaattgtaaaataaaaaaaaaaaaaaaaaataaaaaattgcaaaaattcggcgctcgcgcgcgctgcgcgcgcgagcgccgtcacgcgccggcgctcgcgcgccgcgcgtatgtgctaacacaccacgcacctagattggggtgcgcgcgtagcgcgcgcaccccaatgcgccccgccctcgttccgacccgcttgcgcgggtcggaccacttcgggctcgggggggcgcgcctgcggcgcttatttactaaacagactccgagtcgccattgggccccccctaagctccgcccccctcatgaatattcataaaggaaaccacaaaattagaattgccgaccacaaactgccatatgctaattagttccccttttacacagtaaaaaggggaagtgggggggcagagcccccccacaccccccgcggggggggcagagccccccccgcaccccccctacgtcacaggccacgcccccgccgccatcttgggtgcggcagggcggggactaaaatggcgggacccaatcattttatactttcactttccaattaaaacccgccacgtcacacaaaag

SEQ ID NO: 62 - protein, 101 aa, Gammatorquevirus sp.
MWMSGIADSHDSWCDCDTPFAHLLASIFPPGHTDRTRTIQEILTRDFRKTCLSGGADATNSGMAETIEEKREDFQKEEKEDFTEEQNIEDLLAAVADAEGR

SEQ ID NO: 63 - protein, 237 aa, Gammatorquevirus sp.
MWMSGIADSHDSWCDCDTPFAHLLASIFPPGHTDRTRTIQEILTRDFRKTCLSGGADATNSGMAETIEEKREDFQKEEKEDFTEEQNIEDLLAAVADAEGRYQTNQLKTQETKTNMMCPIQSKKHYKLLTQQKTLLPRCSMTGTTDGVALHQQLLKECNKTSQLIHLSNLIQTQNQHPRKKDYYQSSTTHKRKRKRSTNVSSLSAKKVHARSRKRRKTSSSSSSSSSSSSRNSSTTS

SEQ ID NO: 64 - protein, 239 aa, Gammatorquevirus sp.
MWMSGIADSHDSWCDCDTPFAHLLASIFPPGHTDRTRTIQEILTRDFRKTCLSGGADATNSGMAETIEEKREDFQKEEKEDFTEEQNIEDLLAAVADAEGRTSTQEKKTTTSPPRPTKENGKDQPMSPLSLRRKYMPGAGNGGKHPQAHPAAAAAAAETQAQPLSTNQGLKSETKIITTTNGGTRITLTRFKPGFEQETEKELAQAFNRPPRLFKEDKPFYPWLPRFTPLVNFHLNFKG

SEQ ID NO: 65 - protein, 673 aa, Gammatorquevirus sp.
MPFWWGRRNKFWYGRNYRRKKRRFPKRRKRRFYRRTKYRRPARRRRRRRRKVRRKKKTLIVRQWQPDSIVLCKIKGYDSIIWGAEGTQFQCSTHEMYEYTRQKYPGGGGFGVQLYSLEYLYDQWKLRNNIWTKTNQLKDLCRYLKCVMTFYRHQHIDFVIVYERQPPFEIDKLTYMKYHPYMLLQRKHKIILPSQTTNPRGKLKKKKTIKPPKQMLSKWFFQQQFAKYDLLLIAAAACSLRYPRIGCCNENRMITLYCLNTKFYQDTEWGTTKQAPHYFKPYATINKSMIFVSNYGGKKTEYNIGQWIETDIPGEGNLARYYRSISKEGGYFSPKILQAYQTKVKSVDYKPLPIVLGRYNPAIDDGKGNKIYLQTIMNGHWGLPQKTPDYIIEEVPLWLGFWGYYNYLKQTRTEAIFPLHMFVVQSKYIQTQQTETPNNFWAFIDNSFIQGKNPWDSVITYSEQKLWFPTVAWQLKTINAICESGPYVPKLDNQTYSTWELATHYSFHFKWGGPQISDQPVEDPGNKNKYDVPDTIKEALQIVNPAKNIAATMFHDWDYRRGCITSTAIKRMQQNLPTDSSLESDSDSEPAPKKKRLLPVLHDPQKKTEKINQCLLSLCEESTCQEQETEENILKLIQQQQQQQQKLKHNLLVLIKDLKVKQRLLQLQTGVLE

SEQ ID NO: 66 - protein, 209 aa, Gammatorquevirus sp.
MPFWWGRRNKFWYGRNYRRKKRRFPKRRKRRFYRRTKYRRPARRRRRRRRKISDQPVEDPGNKNKYDVPDTIKEALQIVNPAKNIAATMFHDWDYRRGCITSTAIKRMQQNLPTDSSLESDSDSEPAPKKKRLLPVLHDPQKKTEKINQCLLSLCEESTCQEQETEENILKLIQQQQQQQQKLKHNLLVLIKDLKVKQRLLQLQTGVLE

SEQ ID NO: 67 - protein, 209 aa, Gammatorquevirus sp.; identical to SEQ ID NO: 66

SEQ ID NO: 68 - protein, 25 aa, unidentified
  VARIANT 9: note = Any amino acid
  VARIANT 10: note = Any amino acid
  VARIANT 15: note = Any amino acid
  VARIANT 17: note = Any amino acid
  VARIANT 20: note = Any amino acid
  VARIANT 24: note = Any amino acid
LIJRQWQPXXIRRCXIXGYXPLIXC

SEQ ID NO: 69 - protein, 7 aa, unidentified
  VARIANT 3: note = Any amino acid
  VARIANT 4: note = Any amino acid
  VARIANT 6: note = Any amino acid
NYXXHXD

SEQ ID NO: 70 - protein, 9 aa, unidentified
  VARIANT 4: note = Any amino acid
  VARIANT 5: note = Any amino acid
FSLXXLYDZ

SEQ ID NO: 71 - protein, 18 aa, unidentified
  VARIANT 2: note = Any amino acid
  VARIANT 5: note = Any amino acid
  VARIANT 8: note = Any amino acid
  VARIANT 16: note = Any amino acid
NXWTXSNXDLDLCRYXGC

SEQ ID NO: 72 - protein, 16 aa, unidentified
  VARIANT 2: note = Any amino acid
  VARIANT 5: note = Any amino acid
  VARIANT 9: note = Any amino acid
  VARIANT 11: note = Any amino acid
  VARIANT 13: note = Any amino acid
TXPSXHPGXMXLXKHK

SEQ ID NO: 73 - protein, 10 aa, unidentified
  VARIANT 5: note = Any amino acid
  VARIANT 9: note = Any amino acid
IPSLXTRPXG

SEQ ID NO: 74 - protein, 18 aa, unidentified
  VARIANT 3: note = Any amino acid
  VARIANT 6: note = Any amino acid
  VARIANT 9: note = Any amino acid
  VARIANT 16: note = Any amino acid
RIXPPXLFXDKWYFQXDL

SEQ ID NO: 75 - protein, 8 aa, unidentified
  VARIANT 3: note = Any amino acid
  VARIANT 5: note = Any amino acid
LLXIXATA

SEQ ID NO: 76 - protein, 11 aa, unidentified
  VARIANT 2: note = Any amino acid
  VARIANT 3: note = Any amino acid
  VARIANT 6: note = Any amino acid
  VARIANT 9: note = Any amino acid
LXXPFXSPXTD

SEQ ID NO: 77 - protein, 14 aa, unidentified
  VARIANT 4: note = Any amino acid
  VARIANT 5: note = Any amino acid
  VARIANT 9: note = Any amino acid
  VARIANT 12: note = Any amino acid
YNPXXDKGXGNXIW

SEQ ID NO: 78 - protein, 8 aa, unidentified
  VARIANT 7: note = Any amino acid
CPYTZPXL

SEQ ID NO: 79 - protein, 8 aa, unidentified
  VARIANT 1: note = Any amino acid
  VARIANT 4: note = Any amino acid
  VARIANT 6: note = Any amino acid
XFGXGXMP

SEQ ID NO: 80 - protein, 8 aa, unidentified
  VARIANT 3: note = Any amino acid
  VARIANT 6: note = Any amino acid
  VARIANT 8: note = Any amino acid
HQXEVXEX

SEQ ID NO: 81 - protein, 12 aa, unidentified
  VARIANT 3: note = Any amino acid
  VARIANT 5: note = Any amino acid
  VARIANT 7: note = Any amino acid
KYXFXFXWGGNP

SEQ ID NO: 82 - protein, 8 aa, unidentified
  VARIANT 5: note = Any amino acid
HSWDXRRG

SEQ ID NO: 83 - protein, 7 aa, unidentified
  VARIANT 5: note = Any amino acid
AIKRXQQ

SEQ ID NO: 84 - protein, 8 aa, unidentified
  VARIANT 1: note = Any amino acid
  VARIANT 5: note = Any amino acid
  VARIANT 6: note = Any amino acid
XQZQXXLR

SEQ ID NO: 85 - protein, 9 aa, unidentified
  VARIANT 3: note = Any amino acid
  VARIANT 6: note = Any amino acid
  VARIANT 7: note = Any amino acid
PRXJQXXDP

SEQ ID NO: 86 - protein, 8 aa, unidentified
  VARIANT 5: note = Any amino acid
HSWDXRRG

SEQ ID NO: 87 - protein, 7 aa, unidentified
  VARIANT 5: note = Any amino acid
AIKRXQQ

SEQ ID NO: 88 - protein, 7 aa, unidentified
  VARIANT 4: note = Any amino acid
  VARIANT 5: note = Any amino acid
QZQXXLR

SEQ ID NO: 89 - protein, 7 aa, unidentified
  VARIANT 2: note = Any amino acid
KXKRRRR

SEQ ID NO: 90 - protein, 13 aa, unidentified
  VARIANT 3: note = Any amino acid
  VARIANT 6: note = Any amino acid
  VARIANT 7: note = Any amino acid
  VARIANT 10: note = Any amino acid
  VARIANT 11: note = Any amino acid
PIXSLXXYKXXTR

SEQ ID NO: 91 - protein, 12 aa, unidentified
  VARIANT 3: note = Any amino acid
  VARIANT 10: note = Any amino acid
LAXQLLKECXKN

SEQ ID NO: 92 - protein, 6 aa, unidentified
  VARIANT 4: note = Any amino acid
HLNXLA

SEQ ID NO: 93 - protein, 5 aa, unidentified
DRPPR

SEQ ID NO: 94 - protein, 9 aa, unidentified
  VARIANT 2: note = Any amino acid
  VARIANT 8: note = Any amino acid
DXPFYPWXP

SEQ ID NO: 95 - protein, 7 aa, unidentified
  VARIANT 2: note = Any amino acid
  VARIANT 6: note = Any amino acid
VXFKLXF

SEQ ID NO: 96 - protein, 15 aa, unidentified
  VARIANT 2: note = Any amino acid
  VARIANT 9: note = Any amino acid
  VARIANT 14: note = Any amino acid
WXPPVHBVXGIERXW

SEQ ID NO: 97 - protein, 6 aa, unidentified
  VARIANT 6: note = Any amino acid
AKRKLX

SEQ ID NO: 98 - protein, 10 aa, unidentified
  VARIANT 4: note = Any amino acid
  VARIANT 7: note = Any amino acid
  VARIANT 8: note = Any amino acid
PSSXDWXXEY

SEQ ID NO: 99 - protein, 5 aa, unidentified
DRPPR

SEQ ID NO: 100 - DNA, 2319 bp, Chicken anemia virus
  source 1..2319: mol_type = genomic DNA
gaattccgagtggttactattccatcaccattctagcctgtacacagaaagtcaagatggacgaatcgctcgacttcgctcgcgattcgtcgaaggcggggggccggaggccccccggtggcccccctccaacgagtggagcacgtacaggggggtacgtcatccgtacaggggggtacgtcatccgtacaggggggtacgtcacaaagaggcgttcccgtacaggggggtacgtcacgcgtacaggggggtacgtcacagccaatcaaaagctgccacgttgcgaaagtgacgtttcgaaaatgggcggcgcaagcctctctatatattgagcgcacataccggtcggcagtaggtatacgcaaggcggtccgggtggatgcacgggaacggcggacaaccggccgctgggggcagtgaatcggcgcttagccgagaggggcaacctgggcccagcggagccgcgcaggggcaagtaatttcaaatgaacgctctccaagaagatactccacccggaccatcaacggtgttcaggccaccaacaagttcacggccgttggaaacccctcactgcagagagatccggattggtatcgctggaattacaatcactctatcgctgtgtggctgcgcgaatgctcgcgctcccacgctaagatctgcaactgcggacaattcagaaagcactggtttcaagaatgtgccggacttgaggaccgatcaacccaagcctccctcgaagaagcgatcctgcgacccctccgagtacagggtaagcgagctaaaagaaagcttgattaccactactcccagccgaccccgaaccgcaaaaaggcgtataagactgtaagatggcaagacgagctcgcagaccgagaggccgattttactccttcagaagaggacggtggcaccacctcaagcgacttcgacgaagatataaatttcgacatcggaggagacagcggtatcgtagacgagcttttaggaaggcctttcacaacccccgccccggtacgtatagtgtgaggctgccgaacccccaatctactatgactatccgcttccaaggggtcatctttctcacggaaggactcattctgcctaaaaacagcacagcggggggctatgcagaccacatgtacggggcgagagtcgccaagatctctgtgaacctgaaagagttcctgctagcctcaatgaacctgacatacgtgagcaaaatcggaggccccatcgccggtgagttgattgcggacgggtctaaatcacaagccgcggacaattggcctaattgctggctgccgctagataataacgtgccctccgctacaccatcggcatggtggagatgggccttaatgatgatgcagcccacggactcttgccggttctttaatcacccaaagcagatgaccctgcaagacatgggtcgcatgtttgggggctggcacctgttccgacacattgaaacccgctttcagctccttgccactaagaatgagggatccttcagccccgtggcgagtcttctctcccagggagagtacctcacgcgtcgggacgatgttaagtacagcagcgatcaccagaaccggtggcaaaaaggcggacaaccgatgacggggggcattgcttatgcgaccgggaaaatgagacccgacgagcaacagtaccctgctatgcccccagaccccccgatcatcaccgctactacagcgcaaggcacgcaagtccgctgcatgaatagcacgcaagcttggtggtcatgggacacatatatgagctttgcaacactcacagcactcggtgcacaatggtcttttcctccagggcaacgttcagtttctagacggtccttcaaccaccacaaggcgagaggagccggggaccccaagggccagagatggcacacgctggtgccgctcggcacggagaccatcaccgacagctacatgtcagcacccgcatcagagctggacactaatttctttacgctttacgtagcgcaaggcacaaataagtcgcaacagtacaagttcggcacagctacatacgcgctaaaggagccggtaatgaagagcgatgcatgggcagtggtacgcgtccagtcggtctggcagctgggtaacaggcagaggccatacccatgggacgtcaactgggcgaacagcaccatgtactgggggacgcagccctgaaaaggggggggggctaaagccccccccccttaaacccccccctgggggggattcccccccagaccccccctttatatagcactcaataaacgcagaaaatagatttatcgcactatc

SEQ ID NO: 101 - protein, 8 aa, unidentified
  VARIANT 3: note = Any amino acid
  VARIANT 7: note = Any amino acid
NVXFKLXF

SEQ ID NO: 102 - protein, 25 aa, unidentified
  VARIANT 2: note = Any amino acid
  VARIANT 3: note = Any amino acid
  VARIANT 4: note = Any amino acid
  VARIANT 5: note = Any amino acid
  VARIANT 9: note = Any amino acid
  VARIANT 10: note = Any amino acid
  VARIANT 11: note = Any amino acid
  VARIANT 12: note = Any amino acid
  VARIANT 13: note = Any amino acid
  VARIANT 15: note = Any amino acid
  VARIANT 17: note = Any amino acid
  VARIANT 19: note = Any amino acid
  VARIANT 20: note = Any amino acid
  VARIANT 21: note = Any amino acid
JXXXXWQPXXXXXCXIXGXXXJWQP

SEQ ID NO: 103 - protein, 15 aa, unidentified
  VARIANT 2: note = Any amino acid
  VARIANT 4: note = Any amino acid
  VARIANT 5: note = Any amino acid
  VARIANT 6: note = Any amino acid
  VARIANT 8: note = Any amino acid
  VARIANT 9: note = Any amino acid
  VARIANT 10: note = Any amino acid
  VARIANT 11: note = Any amino acid
  VARIANT 13: note = Any amino acid
NXWXXXNXXXXLXRY

SEQ ID NO: 104 - protein, 8 aa, unidentified
  VARIANT 4: note = Any amino acid
  VARIANT 5: note = Any amino acid
  VARIANT 7: note = Any amino acid
YNPXXDXG

SEQ ID NO: 105 - DNA, 71 bp, unidentified
  source 1..71: mol_type = unassigned DNA
cgggtgccgkaggtgagtttacacaccgmagtcaaggggcaattcgggctcrggactggccgggcyhtggg

SEQ ID NO: 106 - DNA, 71 bp, unidentified
  source 1..71: mol_type = unassigned DNA
cgggtgccggaggtgagtttacacaccgcagtcaaggggcaattcgggctcgggactggccgggctwtggg

SEQ ID NO: 107 - DNA, 71 bp, unidentified
  source 1..71: mol_type = unassigned DNA
cgggtgccgtaggtgagtttacacaccgcagtcaaggggcaattcgggctcgggactggccgggctatggg

SEQ ID NO: 108 - DNA, 71 bp, unidentified
  source 1..71: mol_type = unassigned DNA
cgggtgccggaggtgagtttacacaccgcagtcaaggggcaattcgggctcgggactggccgggccctggg

SEQ ID NO: 109 - DNA, 71 bp, unidentified
  source 1..71: mol_type = unassigned DNA
cgggtgccggaggtgagtttacacaccgcagtcaaggggcaattcgggctcgggactggccgggctttggg

SEQ ID NO: 110 - DNA, 71 bp, unidentified
  source 1..71: mol_type = unassigned DNA
cgggtgccggaggtgagtttacacaccgcagtcaaggggcaattcgggctcgggactggccgggctatggg

SEQ ID NO: 111 - DNA, 71 bp, unidentified
  source 1..71: mol_type = unassigned DNA
cgggtgccggaggtgagtttacacaccgaagtcaaggggcaattcgggctcaggactggccgggctttggg

SEQ ID NO: 112 - DNA, 71 bp, unidentified
  source 1..71: mol_type = unassigned DNA
cgggtgccggaggtgagtttacacaccgcagtcaaggggcaattcgggctcgggactggccgggcyhtggg

SEQ ID NO: 113 - DNA, 71 bp, Alphatorquevirus sp.; identical to SEQ ID NO: 107
  source 1..71: mol_type = genomic DNA

SEQ ID NO: 114 - DNA, 70 bp, Alphatorquevirus sp.
  source 1..70: mol_type = genomic DNA
cgggtgccggaggtgagtttacacaccgcagtcaaggggcaattcgggctcgggactggccgggcccggg

SEQ ID NO: 115 - DNA, 71 bp, Alphatorquevirus sp.; identical to SEQ ID NO: 111
  source 1..71: mol_type = genomic DNA

SEQ ID NO: 116 - DNA, 69 bp, Alphatorquevirus sp.
  source 1..69: mol_type = genomic DNA
cgggtgccggaggtgagtttacacaccgcagtcaaggggcaattcgggctcgggaggccgggccatggg

SEQ ID NO: 117 - DNA, 71 bp, Alphatorquevirus sp.
  source 1..71: mol_type = genomic DNA
cgggtgccggaggtgagtttacacaccgcagtcaaggggcaattcgggctcgggactggccgggccccggg

SEQ ID NO: 118 - DNA, 71 bp, Alphatorquevirus sp.; identical to SEQ ID NO: 110
  source 1..71: mol_type = genomic DNA

SEQ ID NO: 119 - DNA, 71 bp, Alphatorquevirus sp.
  source 1..71: mol_type = genomic DNA
cgggtgccgaaggtgagtttacacaccgcagtcaaggggcaattcgggctcgggactggccgggctatggg

SEQ ID NO: 120 - DNA, 117 bp, unidentified
  source 1..117: mol_type = unassigned DNA
  misc_difference 10: note = May or may not be present
  misc_difference 12: note = May or may not be present
  misc_difference 30: note = May or may not be present
  misc_difference 31: note = May or may not be present
  misc_difference 32: note = May or may not be present
  misc_difference 34: note = May or may not be present
  misc_difference 43: note = May or may not be present
  misc_difference 44: note = May or may not be present
  misc_difference 45: note = May or may not be present
  misc_difference 46: note = May or may not be present
  misc_difference 52: note = May or may not be present
  misc_difference 53: note = May or may not be present
  misc_difference 54: note = May or may not be present
  misc_difference 70: note = May or may not be present
  misc_difference 71: note = May or may not be present
  misc_difference 89: note = May or may not be present
  misc_difference 90: note = May or may not be present
  misc_difference 103: note = May or may not be present
cggcggsggsgcsscgcgctdcgcgcgcsgcccrsyrggggrdssmmwgcskcscccccccscgcgcatgcgcrcgggkcccccccccyvsggggggctccgcccccccggcccccc

SEQ ID NO: 121 - DNA, 169 bp, unidentified
  source 1..169: mol_type = unassigned DNA
  misc_difference 20: note = a, c, t, g, unknown or other
  misc_difference 22: note = a, c, t, g, unknown or other
  misc_difference 40: note = a, c, t, g, unknown or other
  misc_difference 41: note = a, c, t, g, unknown or other
  misc_difference 42: note = a, c, t, g, unknown or other
  misc_difference 53: note = a, c, t, g, unknown or other
  misc_difference 54: note = a, c, t, g, unknown or other
  misc_difference 55: note = a, c, t, g, unknown or other
  misc_difference 56: note = a, c, t, g, unknown or other
  misc_difference 62: note = a, c, t, g, unknown or other
  misc_difference 64: note = a, c, t, g, unknown or other
  misc_difference 97: note = a, c, t, g, unknown or other
  misc_difference 98: note = a, c, t, g, unknown or other
gccgccgcggcggcggsggngnsgcgcgctdcgcgcgcsnnncrccrgggggnnnncwgcsncncccccccccgcgcatgcgcgggkcccccccccnncggggggctccgccccccggcccccccccgtgctaaacccaccgcgcatgcgcgaccacgcccccgccgcc

SEQ ID NO: 122 - DNA, 79 bp, unidentified
  source 1..79: mol_type = unassigned DNA
  misc_difference 20: note = a, c, t, g, unknown or other
  misc_difference 22: note = a, c, t, g, unknown or other
  misc_difference 40: note = a, c, t, g, unknown or other
  misc_difference 41: note = a, c, t, g, unknown or other
  misc_difference 42: note = a, c, t, g, unknown or other
  misc_difference 53: note = a, c, t, g, unknown or other
  misc_difference 54: note = a, c, t, g, unknown or other
  misc_difference 55: note = a, c, t, g, unknown or other
  misc_difference 56: note = a, c, t, g, unknown or other
  misc_difference 62: note = a, c, t, g, unknown or other
  misc_difference 64: note = a, c, t, g, unknown or other
gccgccgcggcggcggsggngnsgcgcgctdcgcgcgcsnnncrccrgggggnnnncwgcsncncccccccccgcgcat

SEQ ID NO: 123 - DNA, 31 bp, unidentified
  source 1..31: mol_type = unassigned DNA
  misc_difference 18: note = a, c, t, g, unknown or other
  misc_difference 19: note = a, c, t, g, unknown or other
gcgcgggkcccccccccnncggggggctccg

SEQ ID NO: 124 - DNA, 59 bp, unidentified
  source 1..59: mol_type = unassigned DNA
ccccccggcccccccccgtgctaaacccaccgcgcatgcgcgaccacgcccccgccgcc

SEQ ID NO: 125 - DNA, 156 bp, unidentified
  source 1..156: mol_type = unassigned DNA
gcggcgggggggcggccgcgttcgcgcgccgcccaccagggggtgctgcgcgcccccccccgcgcatgcgcggggcccccccccgggggggctccgcccccccggcccccccccgtgctaaacccaccgcgcatgcgcgaccacgcccccgccgcc

SEQ ID NO: 126-128 - skipped (3 entries)

SEQ ID NO: 129 - DNA, 25 bp, unidentified
  source 1..25: mol_type = unassigned DNA
ttcgcgcgccgcccaccagggggtg

SEQ ID NO: 130 - skipped

SEQ ID NO: 131 - DNA, 17 bp, unidentified
  source 1..17: mol_type = unassigned DNA
cgcccccccccgcgcat

SEQ ID NO: 132 - DNA, 17 bp, unidentified
  source 1..17: mol_type = unassigned DNA
gcgcggggccccccccc

SEQ ID NO: 133 - DNA, 72 bp, unidentified
  source 1..72: mol_type = unassigned DNA
gggggggctccgcccccccggcccccccccgtgctaaacccaccgcgcatgcgcgaccacgcccccgccgcc

SEQ ID NO: 134 - DNA, 115 bp, unidentified
  source 1..115: mol_type = unassigned DNA
cggcggcggcggcgcgcgcgctgcgcgcgcgcgccgggggggcgccagcgcccccccccccgcgcatgcacgggtccccccccccacggggggctccgccccccggccccccccc

SEQ ID NO: 135 - DNA, 14 bp, unidentified
  source 1..14: mol_type = unassigned DNA
cggcggcggcggcg

SEQ ID NO: 136 - DNA, 17 bp, unidentified
  source 1..17: mol_type = unassigned DNA
cgcgcgctgcgcgcgcg

SEQ ID NO: 137 - DNA, 19 bp, unidentified
  source 1..19: mol_type = unassigned DNA
cgccgggggggcgccagcg

SEQ ID NO: 138 - DNA, 17 bp, unidentified
  source 1..17: mol_type = unassigned DNA
cccccccccccgcgcat

SEQ ID NO: 139 - DNA, 31 bp, unidentified
  source 1..31: mol_type = unassigned DNA
gcacgggtccccccccccacggggggctccg

SEQ ID NO: 140 - DNA, 17 bp, unidentified
  source 1..17: mol_type = unassigned DNA
ccccccggccccccccc

SEQ ID NO: 141 - DNA, 121 bp, unidentified
  source 1..121: mol_type = unassigned DNA
ccgtcggcgggggggccgcgcgctgcgcgcgcggcccccgggggaggcacagcctcccccccccgcgcgcatgcgcgcgggtccccccccctccggggggctccgccccccggcccccccc

SEQ ID NO: 142 - DNA, 37 bp, unidentified
  source 1..37: mol_type = unassigned DNA
ccgtcggcgggggggccgcgcgctgcgcgcgcggccc

SEQ ID NO: 143 - DNA, 84 bp, unidentified
  source 1..84: mol_type = unassigned DNA
ccgggggaggcacagcctcccccccccgcgcgcatgcgcgcgggtccccccccctccggggggctccgccccccggcccccccc

SEQ ID NO: 144 - DNA, 104 bp, unidentified
  source 1..104: mol_type = unassigned DNA
cggcggcggcgcgcgcgctacgcgcgcgcgccggggggctgccgccccccccccgcgcatgcgcggggcccccccccgcggggggctccgccccccggcccccc

SEQ ID NO: 145 - DNA, 11 bp, unidentified
  source 1..11: mol_type = unassigned DNA
cggcggcggcg

SEQ ID NO: 146 - DNA, 17 bp, unidentified
  source 1..17: mol_type = unassigned DNA
cgcgcgctacgcgcgcg

SEQ ID NO: 147 - DNA, 10 bp, unidentified
  source 1..10: mol_type = unassigned DNA
cgccgggggg

SEQ ID NO: 148 - skipped

SEQ ID NO: 149 - DNA, 15 bp, unidentified
  source 1..15: mol_type = unassigned DNA
cccccccccgcgcat

SEQ ID NO: 150 - DNA, 17 bp, unidentified
  source 1..17: mol_type = unassigned DNA
gcgcggggccccccccc

SEQ ID NO: 151 - DNA, 13 bp, unidentified
  source 1..13: mol_type = unassigned DNA
gcggggggctccg

SEQ ID NO: 152 - DNA, 14 bp, unidentified
  source 1..14: mol_type = unassigned DNA
ccccccggcccccc

SEQ ID NO: 153 - DNA, 122 bp, unidentified
  source 1..122: mol_type = unassigned DNA
gccgccgcggcggcggggggcggcgcgctgcgcgcgccgcccagtagggggagccatgcgcccccccccgcgcatgcgcggggcccccccccgcggggggctccgccccccggccccccccg

SEQ ID NO: 154 - DNA, 19 bp, unidentified
  source 1..19: mol_type = unassigned DNA
gccgccgcggcggcggggg

SEQ ID NO: 155 - DNA, 41 bp, unidentified
  source 1..41: mol_type = unassigned DNA
gcggcgcgctgcgcgcgccgcccagtagggggagccatgcg

SEQ ID NO: 156 - DNA, 15 bp, unidentified
  source 1..15: mol_type = unassigned DNA
cccccccccgcgcat

SEQ ID NO: 157 - DNA, 17 bp, unidentified
  source 1..17: mol_type = unassigned DNA
gcgcggggccccccccc

SEQ ID NO: 158 - DNA, 13 bp, unidentified
  source 1..13: mol_type = unassigned DNA
gcggggggctccg

SEQ ID NO: 159 - DNA, 17 bp, unidentified
  source 1..17: mol_type = unassigned DNA
ccccccggccccccccg

SEQ ID NO: 160 - DNA, 36 bp, unidentified
  source 1..36: mol_type = unassigned DNA
cgcgctgcgcgcgccgcccagtagggggagccatgc

SEQ ID NO: 161 - DNA, 78 bp, unidentified
  source 1..78: mol_type = unassigned DNA
ccgccatcttaagtagttgaggcggacggtggcgtgagttcaaaggtcaccatcagccacacctactcaaaatggtgg

SEQ ID NO: 162 - DNA, 172 bp, unidentified
  source 1..172: mol_type = unassigned DNA
cttaagtagttgaggcggacggtggcgtgagttcaaaggtcaccatcagccacacctactcaaaatggtggacaatttcttccgggtcaaaggttacagccgccatgttaaaacacgtgacgtatgacgtcacggccgccattttgtgacacaagatggccgacttccttcc

SEQ ID NO: 163 - DNA, 36 bp, Alphatorquevirus sp.; identical to SEQ ID NO: 160
  source 1..36: mol_type = genomic DNA

SEQ ID NO: 164 - DNA, 36 bp, unidentified
  source 1..36: mol_type = unassigned DNA
gcgctdcgcgcgcgcgccggggggctgcgccccccc

SEQ ID NO: 165 - DNA, 36 bp, unidentified
  source 1..36: mol_type = unassigned DNA
gcgcttcgcgcgccgcccactagggggcgttgcgcg

SEQ ID NO: 166 - DNA, 36 bp, unidentified
  source 1..36: mol_type = unassigned DNA
gcgctgcgcgcgccgcccagtagggggcgcaatgcg

SEQ ID NO: 167 - DNA, 36 bp, unidentified
  source 1..36: mol_type = unassigned DNA
gcgctgcgcgcgcggcccccgggggaggcattgcct

SEQ ID NO: 168 - DNA, 36 bp, unidentified
  source 1..36: mol_type = unassigned DNA
gcgctgcgcgcgcgcgccgggggggcgccagcgccc

SEQ ID NO: 169 - DNA, 36 bp, unidentified
  source 1..36: mol_type = unassigned DNA
gcgcttcgcgcgcgcgccggggggctccgccccccc

SEQ ID NO: 170 - DNA, 36 bp, unidentified
  source 1..36: mol_type = unassigned DNA
gcgcttcgcgcgcgcgccggggggctgcgccccccc

SEQ ID NO: 171 - DNA, 36 bp, unidentified
  source 1..36: mol_type = unassigned DNA
gcgctacgcgcgcgcgccggggggctgcgccccccc

SEQ ID NO: 172 - DNA, 36 bp, unidentified
  source 1..36: mol_type = unassigned DNA
gcgctacgcgcgcgcgccggggggctctgccccccc

SEQ ID NO: 173-185 - skipped (13 entries)

SEQ ID NO: 186 - protein, 68 aa, synthetic construct
MAWGWWKRRRRWWFRKRWTRGRLRRRWPRSARRRPRRRRVRRRRRWRRGRRKTRTYRRRRRFRRRGRK

SEQ ID NO: 187-199 - skipped (13 entries)

SEQ ID NO: 200 - DNA, 2825 bp, Betatorquevirus sp.
  source 1..2825: mol_type = genomic DNA
aggccagcattatttcacagtcggtgtccgtttctttaagttaaaacttatataaacatccattacctccctaatacgcaggcgcacaagggggctccgcccccttaaacccccaagggggctccgcccccttacaccccaagggggctccgcccccttacacccccaagggggctccgcccccttacacccccttattaatattcaacaggaaaaccacctaatttaaattgccgaccacaaacggtcttttatttcctcattcacacaatacttcctctttacctaattattattcattacattaattaataatcaccatcacaaagggcggagactgctatctatataactaactacacagacgaatggctgagtttatgccgccagacggaggactcatcacttcagtgactgaggactgatcttgggcaggtgccgaaggtgagtgaaaccaccgaagtcaaggggcaatatgggctagatcagtctggcggaacgggcaagaaacttaatgtatactttctttacagatatgacacattacttaaaaacaccacaatacaatggacgcgcaatggaacttcaattaatgaatacaattattggaaaccatgatctctgctgtggatgcatgacaccagttcttcatattaaagaaataatcaacaccttttcatatacaccatgcccccgtactactggagacaaagaagaccaacatggagacaaagaaactaccgacgctttagaaggcctagaagatggagaattagatcgcttgttcgccgccgatggagaagacgacgaagggtaagaaacaaaagactgtttttccgacgaaaaaaactgactcgactgactttaaaagaatggcaacctaaaaaaattaaaaaatgttccataaaaggaatactacctgcattcatatgcggaaaatcaagaatagcaaacaactatatattattttcagaaagcatagtaccggtgggagaacccggaggaggggcctggtcaatactacaaataaacttaagagtattatatgaccaatttataaaatttaaaaactggtggactgctagcaaccaaggcctaccactaacaagatacttaggaatgaaagtgacattctacaaaactcaatttgtagactacatagttataccacaactatgccctccattttctgtaacaagagacaactacctaaacatacatccagttagaatgttaatgaacagacacaaaattataataccacaaagacaaaaaggaaagaaaaactacattaaaaaatggtttagaccacctgacttaatgcaaaacaaatggtatttccaacaagacatagtaaacataccacttatagtactacacatatcagcagcaagccttgaccaatatagtataccagaaaaccaaatatcaacaaacataacactttggtctctaaacacagacttctttagaaacaaccaattcacaggttatgaagactcaggatacataccaaaaacatttggaacacaaaactactatttatacactgaaggtaatggtgtttctcgcccaactaaattcagtcaaatgataccattaaaaaacacaacaacatatacaaacggaaaaaaagcagcaaccatagaaaactggaaagaaaacagttattggggtaatccatttacacaaaaccacgctagtccagatgtaccaatttactacaacaacacaacacccagcgaaaacaactacagcacaccacaaacattcaccccattacatgaactctacttccaatgcagatacaatccagaaaaggacacaggcataggtaacaaagtattttttaaatcaaacaaactaaaacaaggagaaattgacactattccagacaaagacgaaatagttataacagactttccactatggttaatattttactcttggattagctggatacaaaaaagcaaacctatacaacatataatgaatgactactactttattgttataacaccatttatagaaccaaaaagaaaaagctacctatttttagacacttactttgtacagccaataacaaacagattaacagaaacagaaaaacaacactggtatccacaaactggataccaaacagatgtaatttttagctttgcacaaacaggcccagcaacacctaaaatagatagatcacaatcaatacaagcacaatttaaatacaatgtaaaactaaaatggggcggatgtcctgcaccaatggaactaataactgatccatcattacaggacaaatttcccatccccaatacaatcttcaaaacacttgagatccaaaatccagaaacaaacaaaaggactctactgtacgacttcgacgaaagacatgacggacttacggacagagctgcaaaaagaattaaaacagaacaaatatttgaaacatcttttacaggacaactaccaacagatcccaatatcaggatccaaacacaagaaacgacctcatcgtcggaggaagaaagcgaagtatcactcaaggaggagctcaagctcctcaagcgaaaaaacaagcagctcagaaacaagctcctcagactaacatcttactaaaaccaaaaattatatacgctccatacactatgtttggagacaaagccactaaaaaactaacacctattaagggtaaaagttgggaggcagaacttcagttagctaaaatgttcaaaagaccacttagaacttatgaagaggaccccccatattatccctgggttgttcctgaaccagttgtaaactttcacttaaattttaaagaataa

SEQ ID NO: 201 - protein, 642 aa, Betatorquevirus sp.
MPPYYWRQRRPTWRQRNYRRFRRPRRWRIRSLVRRRWRRRRRVRNKRLFFRRKKLTRLTLKEWQPKKIKKCSIKGILPAFICGKSRIANNYILFSESIVPVGEPGGGAWSILQINLRVLYDQFIKFKNWWTASNQGLPLTRYLGMKVTFYKTQFVDYIVIPQLCPPFSVTRDNYLNIHPVRMLMNRHKIIIPQRQKGKKNYIKKWFRPPDLMQNKWYFQQDIVNIPLIVLHISAASLDQYSIPENQISTNITLWSLNTDFFRNNQFTGYEDSGYIPKTFGTQNYYLYTEGNGVSRPTKFSQMIPLKNTTTYTNGKKAATIENWKENSYWGNPFTQNHASPDVPIYYNNTTPSENNYSTPQTFTPLHELYFQCRYNPEKDTGIGNKVFFKSNKLKQGEIDTIPDKDEIVITDFPLWLIFYSWISWIQKSKPIQHIMNDYYFIVITPFIEPKRKSYLFLDTYFVQPITNRLTETEKQHWYPQTGYQTDVIFSFAQTGPATPKIDRSQSIQAQFKYNVKLKWGGCPAPMELITDPSLQDKFPIPNTIFKTLEIQNPETNKRTLLYDFDERHDGLTDRAAKRIKTEQIFETSFTGQLPTDPNIRIQTQETTSSSEEESEVSLKEELKLLKRKNKQLRNKLLRLTSY

SEQ ID NO: 202 - protein, 108 aa, Betatorquevirus sp.
LAERARNLMYTFFTDMTHYLKTPQYNGRAMELQLMNTIIGNHDLCCGCMTPVLHIKEIINTFSYTPCPRTTGDKEDQHGDKETTDALEGLEDGELDRLFAADGEDDEG

SEQ ID NO: 203 - protein, 59 aa, Betatorquevirus sp.
MFGDKATKKLTPIKGKSWEAELQLAKMFKRPLRTYEEDPPYYPWVVPEPVVNFHLNFKE

SEQ ID NO: 204 - DNA, 2967 bp, Betatorquevirus sp.
  source 1..2967: mol_type = genomic DNA
cgggtgctgaaggtgagtgaaaccaccgaaatcaaggggcaattcgggctaggccagtctagcggaacgggcaagtaacttaaatttattttacagatgtcagattattataaaaaactaaccattggaccacgccatgcacaactaaactggaccaacgctattgttacccttcacgatctacaatgccaatgtgatgaaccattatgccacaccattgaaacaattgtaaatcaagaaaaatctttaaaattctcaaaaggattatctgacaaaattaaatcatgccttacggctggagaccatggcgccgcagacgtcgtagaagattttggagacgacgagctagagcgccttttcgcagaagacggtactggagatacagatacagggtaagaaaacttcgtactaaacctaaaaagttaactgtaaaacaatggcaaccaacaaaaatgcggaggctaactgtaactggaaaatacccactttttgagggaacctccgaaagaattggaaataacaatactcaaagtatagacacaattgctccttacttattcccgtctggaggactattttcaataactgtttttactttaaaaggactatatgaacttcacttaaaggctagaaactggtggtctatatctaactgtaacttaccattgataaaatacagaggatgtaaaataactttgtatagaaatactgatgttgactttgtaactgtatatactagatgtggttcactaactgctacagaagaactatacagatcttgccaacctagtttattgctattaaacaaacacaaaaaagtacttacatgcaaaaaaaacaataacaaacgcaaaataagtaaaactataaaaataccaccaccagcactcatgcaaaacaaatggtactttcaaaaagactttgcaaattatccacttgtaatgctattatctgcagctctaagcttagacagatattacacttcagcaaactctatttccagtactataggctttgctagcataaacacaacaatatttcaatacagtgacttcaaatcacctaatataacacaaccatacaaaccaaacgaccagtactggctaggaacatggacaaatcaaacagttactgactttactaaagtacaagtacaacacttaatattactagcaaacacgaatgattatcaaccaggacagccactaggcccaaacaaaacttcctataaagactactttaaatcaaaaattaaatggggaaaccccttttatgcaccttactttgaacctgaaccacaaaaaatttttatgattacaagtttacaaaaaatagaagaagctcaaccaaacgcatatataaacagtttaggatgcactctactaccaccagaaaaaacacttctaacaatttgcagatacaacccccaaaacgacagatcaagacataatgcactatatgcaagccctgtaacaacagccaaaacaaagtggggggcaacaacaaagccagaactaaacacagaaggcttaccactatggttactatcatttggtttccatgactggctcttaaaatctgaaaaagtacaaagactagacctagactatgtatatgttatactatcagaatacataacaccaaaaatggaacattatgtacccgtagaccctaactttacacaaggtagaagtccctttgaaataacagatcacatgagaccaccagacgtaggatactggtttccaaaaactagctaccaacatactgtattttctgaaataataaatacaggtcctggaactgtaaaactaccacctagaatatcagttgaagcaagcatgaaatacaaattttactttacattagggggatgtccacctccaatggacaatgtttgtgacccacaggcccagccggactttcctgaacccggtaacatcatatcgccaactttattgcaggatccagaataccccatcgaatactacttgcaagcctttgacgagcgcaggggactccttacaaaaaaggctgcaaaacgaatcaaaaaagactacgaaactgaacaagatattttctcatctacaggacaaactgcaatggacgtccaactcaaaaccccggagacaacatcgacagaggactcatcggaggaggaaaaagagccgcaaacactgcagttccagctccagcgacacaagcgaaagcagcggaaactcagacaccgaatcctccagttgttaaaactagccaaagatatataataaaacgtagtactataactgtaaatatgtttgatccccctcctcctaaaaacaggagaataacaggctcagactttgaaactgaattacaactagctaaatggatgcacagaccacccagatattatcataatgataaacctttctatccctggctacctatggaaccccttgtaaaccaactgcctaatgtaaatttcaaactcaactttactgaataaaggccagcattaattcactctcggtgtccatttatataagtttaacttaaataaacagcctccgctaattcactctcggtgtccatttatataagtttaacttaaataaacagcctccgcctccctaatacgcaggcgcactgggggctccgcccccaaacccccaagggggctccgcccccttaaacccccaggggggacacccccctttaccccccacaagccactaaatttgcattgccgaccacaaactgaacaggaaaccacaaaatttgcattgccaaccacaaaccgtcaaacacttccctatttcaacttacttctgcttttactcataaatattcattaaataaattaataatcaccatcacatcctgggaggagacacaacactataaaactaactacacagacgaatggctgagtttatgccgctagacgaaggacgcatcggtcacagactgcggactggacttggg

SEQ ID NO: 205 - protein, 660 aa, Betatorquevirus sp.
MPYGWRPWRRRRRRRFWRRRARAPFRRRRYWRYRYRVRKLRTKPKKLTVKQWQPTKMRRLTVTGKYPLFEGTSERIGNNNTQSIDTIAPYLFPSGGLFSITVFTLKGLYELHLKARNWWSISNCNLPLIKYRGCKITLYRNTDVDFVTVYTRCGSLTATEELYRSCQPSLLLLNKHKKVLTCKKNNNKRKISKTIKIPPPALMQNKWYFQKDFANYPLVMLLSAALSLDRYYTSANSISSTIGFASINTTIFQYSDFKSPNITQPYKPNDQYWLGTWTNQTVTDFTKVQVQHLILLANTNDYQPGQPLGPNKTSYKDYFKSKIKWGNPFYAPYFEPEPQKIFMITSLQKIEEAQPNAYINSLGCTLLPPEKTLLTICRYNPQNDRSRHNALYASPVTTAKTKWGATTKPELNTEGLPLWLLSFGFHDWLLKSEKVQRLDLDYVYVILSEYITPKMEHYVPVDPNFTQGRSPFEITDHMRPPDVGYWFPKTSYQHTVFSEIINTGPGTVKLPPRISVEASMKYKFYFTLGGCPPPMDNVCDPQAQPDFPEPGNIISPTLLQDPEYPIEYYLQAFDERRGLLTKKAAKRIKKDYETEQDIFSSTGQTAMDVQLKTPETTSTEDSSEEEKEPQTLQFQLQRHKRKQRKLRHRILQLLKLAKDI

SEQ ID NO: 206 - protein, 99 aa, Betatorquevirus sp.
MSDYYKKLTIGPRHAQLNWTNAIVTLHDLQCQCDEPLCHTIETIVNQEKSLKFSKGLSDKIKSCLTAGDHGAADVVEDFGDDELERLFAEDGTGDTDTG

SEQ ID NO: 207 - DNA, 2984 bp, Betatorquevirus sp.
  source 1..2984: mol_type = genomic DNA
cgggtgccgaaggtgagtgaaaccaccgtagtcaaggggcttatcgggctgggtcagtcttgacggaacgggcaactgtcttaaaatatataatttttattatagatgtccagatatgttccagttaaaaactcaattaaaaatagaaacctagattggattaactgcattgttcaagttcacaacctacaatgttcctgtgaaacaccacttgaacacaccgtagaagaaattctacatcaagaacctaatttggattataaaaaaccaacaaaatgccctactggtaccgcagaccaacttactacagaagaagacgtttttggcgaaggaagtttagaggcccttttcgcagaaaactttggagaagaagaagacgcacctacagggtaagaaaaactaaaaagaaacttaaatacttacatttaaaagaatggcaaccaactagaatcagaaaactaaaaataactggcattatgcctttatacttaacaactcatgacagagtgtcaaataatatggaaatttatatagattctatagcaccaactcatgtacctagtggtggaggattctctattcaacaatatactttaaatggattttatgaactatttactaaaggacgttgttggtggactcaatctactaaagactttcctttaataagatatactggatgtaaaattgacttgtatagatcacaaaactctgactatatttttaactatataaactgttatcctatgagagctaatatggaaacttatcaaagctgtcaacctactatattacagttaactaagaaccataaaattgtcagatgtaaaaaagataacaacttaaaaaaaccatataaaagaattaaaatacacccaccagcacaatttcaaaacaagtggctatttcaaaaggatatggcaagtataccgttacttatgacacgctgctgcgcaacctccctagaccgttggtttcttgcaagcaatgcgcaatcaaccacaataggctttacatcacttaaccccgaaacctttcttttacacaactttcaacgaccaccaacagcaggctacataccaagaccaggagtatacatgtttgccttaactaatggtgcacatgactggtcacaagaaaaaataggagatattatatacctgggtaattctaatcatttacaaccaggaataaccatgagagaattaacacaaagtacagacacttttgacactgtctggacaaaatactttagcagttcagattactggggaaacatatttcttgcaaagtatcttaaacaagaagtaagacttgtagtttctaatttatctccatcacaactaaagcaacattactcctcatttgacactgccataggtaaaacaaactttacattaagaactataccaaacttaatagaatgtagatacaatcccttacaagacagaggtgaccaaaatgaagtatttataacttctatagtgtcagatgctacaccaatacaattaccaacagacccttcactaaaaacagaaaacttacctttatggctggcattcatgggatttatagactttcaaaaaagacagggtacagcacaaaaagtagatgttaactatatggttgtatttcatacaaaatatatgtctcctaaaaacctttcctgggtaatacctatagacaatgactttttaaaccaacactcagaataccaccctgatgacgaagtaacagactatgatagagaaaactggcatccaaaaacaatatttcaatataaaacatgtaatgaaatagttgcatgtggaccaggaataataaaattaccacaaaatgtatcagctgaagctcatgcaaaatacaccttttattttaaggttggaggctgtgctgcagacacaaaagacattaaaaacccagaagaccagccaaaatttcccactcccattaacttcatacaatcaaattcgttgcagaatccagaaaccccaattgaaaactacttatacagctttgactggagaagggacgtccttacaccaaaagctgcagaaagaatcgcagaatactgccttactgaaaagcctttttctgaacttacaggaatcaacatcttcgaaacagaaacatccccagaaacaacatcgacagaaaaccaaacgacacaggaaaaagaaaaagaagcattacagctcctcatccagcagcaccaactccaacagcgagatttcaagcgacgaatcctccaactgctaacacaattaacataaccacttttatatgtcaaaataaagttcaattgtttcctactgctaaaaagaacaggagatttactcctgaggagttcaaagaagaactccaagaggcagcaatatggaaaagagtgcctagaacacatatttttgacagacctacttatccttatctaccatgtgattattctaaaatggttaactttgacttaaacccttctctgtatggaatttaataaaatttcaaggccagcaaaatttcacttgtcggtgtccatttatataagttaaacttaaataaacatccaccactctcccgaatacgcaggcgcagtagggggctccgccccctacaacccccagggggggacaccacccctcaacccccccggaaaccacaaaatttgcattgccgaccacaaacacaccaccactctcccgaatacgcaggcgcagtaggggggctccgccccctacaacccccagggggggacaccccccctcaacccccccggaaaccacaaaatttgcattgccgaccacaaactgccgtatgctaattacttccccaattaccagtaactccacccataattaattattaaacagcgtcatattacaacaggaattaggagtggttaacaacctataaaactaactgcacttccgaatggctgagtttatgccgtcagacggagcgcagaacggagtctcagcgctgacccaggg

SEQ ID NO: 208 - protein, 665 aa, Betatorquevirus sp.
MPYWYRRPTYYRRRRFWRRKFRGPFRRKLWRRRRRTYRVRKTKKKLKYLHLKEWQPTRIRKLKITGIMPLYLTTHDRVSNNMEIYIDSIAPTHVPSGGGFSIQQYTLNGFYELFTKGRCWWTQSTKDFPLIRYTGCKIDLYRSQNSDYIFNYINCYPMRANMETYQSCQPTILQLTKNHKIVRCKKDNNLKKPYKRIKIHPPAQFQNKWLFQKDMASIPLLMTRCCATSLDRWFLASNAQSTTIGFTSLNPETFLLHNFQRPPTAGYIPRPGVYMFALTNGAHDWSQEKIGDIIYLGNSNHLQPGITMRELTQSTDTFDTVWTKYFSSSDYWGNIFLAKYLKQEVRLVVSNLSPSQLKQHYSSFDTAIGKTNFTLRTIPNLIECRYNPLQDRGDQNEVFITSIVSDATPIQLPTDPSLKTENLPLWLAFMGFIDFQKRQGTAQKVDVNYMVVFHTKYMSPKNLSWVIPIDNDFLNQHSEYHPDDEVTDYDRENWHPKTIFQYKTCNEIVACGPGIIKLPQNVSAEAHAKYTFYFKVGGCAADTKDIKNPEDQPKFPTPINFIQSNSLQNPETPIENYLYSFDWRRDVLTPKAAERIAEYCLTEKPFSELTGINIFETETSPETTSTENQTTQEKEKEALQLLIQQHQLQQRDFKRRILQLLTQLT

SEQ ID NO: 209 - protein, 95 aa, Betatorquevirus sp.
MSRYVPVKNSIKNRNLDWINCIVQVHNLQCSCETPLEHTVEEILHQEPNLDYKKPTKCPTGTADQLTTEEDVFGEGSLEALFAENFGEEEDAPTG

SEQ ID NO: 210 - DNA, 2942 bp, Betatorquevirus sp.
  source 1..2942: mol_type = genomic DNA
cgggagccgaaggtgagtgaaaccaccgtagtctaggggcaattcgggctagatcagtctggcggaccgggcaagaaacttaaaataatacctattattttattacagatgaccacaaaatctccatcaagaagagaattaaatcaactaattaatgtatgttgcggagcccacgacctgatctgcgactgcgacgaaccaactaaacacataatccttcacttattttcacacggagaaccctactttgtcaccaccgaacagaaaaacaacatcacaaaatgccttattacagacgacaccgctggcaatacaacccatacacccgctggagacgacgctattggagacggagacctagaaaaacttttcgcagaagatactttccaagaagaagacgccaaagggtaagaagaaaatttaaatacttaaaacttaaagaatggcagccaaaaactattaaaaaatgctgcattaaaggaatgcatcctatatttataacaagcgcaggatccatcagtagaaactatagaatgtatgaacacagcttcactccagaaagatggccaaccggaggaggcttttctgtaactaaatataacttagatggactatatgaacaacatagccttaacagaaactggtggactactagtaatcaaaccttaccacttgtaagatatttaggatgtaaactaaaattttaccaaagctggtcagcagactatgtagttaactggtataataattttcctatgacagcaactcaattattatatgaatcttgtcaacctagcttaatgatgatgaataaaaacaaattaatagtacccagcaaactaacacaacacagaaaaagaccctatgtaacacttagactacccccaccagcacagatgtcaaaccgttggttttttgcaagagatcttgctaaagtaggtttagcaatgttaacagtttcatgttgctcactagacaattactacataggaagcaaccaacagtcaaataatatttcttttatatctttaaacacatacttttggcaaaaacataacttccaacaaccatccataagaggatacagcccgtacacatcaggaacaatagaaaaacacatatggtttacacctgaaaccacagaagtagacaaattaaaaccaacaaatttcatactattaggaaccactaaagaaaaccaagacggacaacacatatcacaatcaaacaaaaacacatactttacaaaccataaattttggggaaacccatttaaacatgattactttactggagccagcaaactttacgtatcaactaaaagctggacagaaataactgcaaaaatggcacaaatagacacagatatcggtgcaggaatactaacagaaccatcaaatccactaaccaacatatgcagatatgcaccagacagagacacaggagaaggaaacaaactatacttaaaaagcaccataagagacgaatctggttgggaacccccaacagacgaagatcttatagcagaaggctttccactatggatactagcctttggattcttagactggcataaaaaactaggcacagcaacaaacttagacagatcatgggtagcagtaatacaatctaactttataagcccacaactaccatattatgtacctttagaccaatacttttatgaaggaacatcaccatatgaaagaacagatgagccacacattaatgatgaagataacaaaaattggtttccatgtacaaaataccaacaagaaacactaaacaatttagcttcctgtggaccaggtatttatagatttggagacagaaaaacagtagaaggaaaactaaaataccaattttactttaagtttggaggatgtgcaccaaagatggacacaattagagaccctactaaacaagaagtatatcccatccccaattgtcagcattccacatattcgttacagaatccaagcatgcctccagaatccctactctggcaattcgacgtctacaaagacatccttacaagtaaagctacaaaaagaattggaaaagatttctcatctaaaaaaactgtattcacagatcaaagtgccatgcagccaacagccagcacagcagcagaaagcgactcatcggaagaaacaccggactcggaagaagagaagacgacactactcttcaagtacaaacagcagcgaagaaagcgaaaatggctggagcaccagctccagcaactagtgtatcaaccataaaattcaaatgtgtaaaaactgtaaaactatttgaaagccctcagagaaatagaaaaatgaacaaatatgaactagcccatgacttagaagcagcaaaagcatttatgagactgccttgtacatatttgcttgaaaaaccttactacccctggctctttcaaaaacatgacaattataatgtaaactttgacttaaactaccagtaaaattttgttggccaactaattacacttgtcggtgtcagtttataatagtatcaacttaaataaacatccaccactaagccaacattgttggcgccataagggggctccgcccccttaaacccccaagggggctccgcccccttaaacccccaaagggggctccgcccccttaaacccccaagggggctccgcccccttaaacccccaggggggctccgcccccctacaccccctaataaatattcaacaggaaaaccacctaattagaattgccgaccacaaaccgtctcatacttcccctttttgtcaacagttcctcttttcctcattattatttattacattaattagtaatcaccgtaattccggggaggagactatacactatataactaactacacagacgaatggctgagtttatcacgccagacggagacggcatcacttcagtgactgcaggctgatcttggg

SEQ ID NO: 211 - protein, 660 aa, Betatorquevirus sp.
MPYYRRHRWQYNPYTRWRRRYWRRRPRKTFRRRYFPRRRRQRVRRKFKYLKLKEWQPKTIKKCCIKGMHPIFITSAGSISRNYRMYEHSFTPERWPTGGGFSVTKYNLDGLYEQHSLNRNWWTTSNQTLPLVRYLGCKLKFYQSWSADYVVNWYNNFPMTATQLLYESCQPSLMMMNKNKLIVPSKLTQHRKRPYVTLRLPPPAQMSNRWFFARDLAKVGLAMLTVSCCSLDNYYIGSNQQSNNISFISLNTYFWQKHNFQQPSIRGYSPYTSGTIEKHIWFTPETTEVDKLKPTNFILLGTTKENQDGQHISQSNKNTYFTNHKFWGNPFKHDYFTGASKLYVSTKSWTEITAKMAQIDTDIGAGILTEPSNPLTNICRYAPDRDTGEGNKLYLKSTIRDESGWEPPTDEDLIAEGFPLWILAFGFLDWHKKLGTATNLDRSWVAVIQSNFISPQLPYYVPLDQYFYEGTSPYERTDEPHINDEDNKNWFPCTKYQQETLNNLASCGPGIYRFGDRKTVEGKLKYQFYFKFGGCAPKMDTIRDPTKQEVYPIPNCQHSTYSLQNPSMPPESLLWQFDVYKDILTSKATKRIGKDFSSKKTVFTDQSAMQPTASTAAESDSSEETPDSEEEKTTLLFKYKQQRRKRKWLEHQLQQLVYQP

SEQ ID NO: 212 - protein, 100 aa, Betatorquevirus sp.
MTTKSPSRRELNQLINVCCGAHDLICDCDEPTKHIILHLFSHGEPYFVTTEQKNNITKCLITDDTAGNTTHTPAGDDAIGDGDLEKLFAEDTFQEEDAKG

SEQ ID NO: 213-215 - skipped (3 entries)

SEQ ID NO: 216 - protein, 38 aa, Betatorquevirus sp.
MPYYYRRRRYNYRRPRWYGRGWIRRPFRRRFRRKRRVR

SEQ ID NO: 217 - protein, 208 aa, synthetic construct
PTYTTIPLKQWQPPYKRTCYIKGQDCLIYYSNLRLGMNSTMYEKSIVPVHWPGGGSFSVSMLTLDALYDIHKLCRNWWTSTNQDLPLVRYKGCKITFYQSTFTDYIVRIHTELPANSNKLTYPNTHPLMMMMSKYKHIIPSRQTRRKKKPYTKIFVKPPPQFENKWYFATDLYKIPLLQIHCTACNLQNPFVKPDKLSNNVTLWSLNT

SEQ ID NO: 218 - skipped

SEQ ID NO: 219 - protein, 163 aa, synthetic construct
TMALTPFNEPIFTQIQYNPDRDTGEDTQLYLLSNATGTGWDPPGIPELILEGFPLWLIYWGFADFQKNLKKVTNIDTNYMLVAKTKFTQKPGTFYLVILNDTFVEGNSPYEKQPLPEDNIKWYPQVQYQLEAQNKLLQTGPFTPNIQGQLSDNISMFYKFYFK

SEQ ID NO: 220 - protein, 129 aa, synthetic construct
WGGSPPKAINVENPAHQIQYPIPRNEHETTSLQSPGEAPESILYSFDYRHGNYTTTALSRISQDWALKDTVSKITEPDRQQLLKQALECLQISEETQEKKEKEVQQLISNLRQQQQLYRERIISLLKDQ

SEQ ID NO: 221-800 - skipped (580 entries)

SEQ ID NO: 801 - DNA, 156 bp, unidentified; identical to SEQ ID NO: 125
  source 1..156: mol_type = unassigned DNA

SEQ ID NO: 802 - DNA, 150 bp, unidentified
  source 1..150: mol_type = unassigned DNA
ccgagcgttagcgaggagtgcgaccctaccccctgggcccacttcttcggagccgcgcgctacgccttcggctgcgcgcggcacctcagacccccgctcgtgctgacacgcttgcgcgtgtcagaccacttcgggctcgcgggggtcggg

SEQ ID NO: 803 - DNA, 122 bp, unidentified; identical to SEQ ID NO: 153
  source 1..122: mol_type = unassigned DNA

SEQ ID NO: 804 - DNA, 111 bp, unidentified
  source 1..111: mol_type = unassigned DNA
cggcccagcggcggcgcgcgcgcttcgcgcgcgcgccggggggctccgcccccccccgcgcatgcgcggggcccccccccgcggggggctccgccccccggtccccccccg

SEQ ID NO: 805 - DNA, 115 bp, unidentified
  source 1..115: mol_type = unassigned DNA
cggccgtgcggcggcgcgcgcgcttcgcgcgcgcgccgggggctgccgcccccccccgcgcatgcgcgcggggcccccccccgcggggggctccgccccccggcccccccccccg

SEQ ID NO: 806 - DNA, 104 bp, unidentified; identical to SEQ ID NO: 144
  source 1..104: mol_type = unassigned DNA

SEQ ID NO: 807 - DNA, 108 bp, unidentified
  source 1..108: mol_type = unassigned DNA
ggcggcggcgcgcgcgctacgcgcgcgcgccggggagctctgcccccccccgcgcatgcgcgcgggtcccccccccgcggggggctccgccccccggtcccccccccg

SEQ ID NO: 808-809 - skipped (2 entries)

SEQ ID NO: 810 - DNA, 133 bp, synthetic construct
  source 1..133: mol_type = other DNA
ggtcaaattgggtatacccatttgggcctagtctagccggcatggcgcattacagcaatacgcaatttaaatgcgcctagcgcattttcccgaccttaatgcgcctcgcgctgtagcctcacgcccacatatg

SEQ ID NO: 811-817 - skipped (7 entries)

SEQ ID NO: 818 - DNA, 36 bp, unidentified
  source 1..36: mol_type = unassigned DNA
gcgctkcgcgcgcgcgccggggggctgcgccccccc

SEQ ID NO: 819 - DNA, 36 bp, unidentified; identical to SEQ ID NO: 165
  source 1..36: mol_type = unassigned DNA

SEQ ID NO: 820 - DNA, 36 bp, unidentified; identical to SEQ ID NO: 166
  source 1..36: mol_type = unassigned DNA

SEQ ID NO: 821 - DNA, 36 bp, unidentified; identical to SEQ ID NO: 167
  source 1..36: mol_type = unassigned DNA

SEQ ID NO: 822 - DNA, 36 bp, unidentified; identical to SEQ ID NO: 168
  source 1..36: mol_type = unassigned DNA

SEQ ID NO: 823 - DNA, 36 bp, unidentified; identical to SEQ ID NO: 169
  source 1..36: mol_type = unassigned DNA

SEQ ID NO: 824 - DNA, 36 bp, unidentified; identical to SEQ ID NO: 169
  source 1..36: mol_type = unassigned DNA

SEQ ID NO: 825 - DNA, 36 bp, unidentified; identical to SEQ ID NO: 170
  source 1..36: mol_type = unassigned DNA

SEQ ID NO: 826 - DNA, 36 bp, unidentified; identical to SEQ ID NO: 171
  source 1..36: mol_type = unassigned DNA

SEQ ID NO: 827 - DNA, 36 bp, unidentified; identical to SEQ ID NO: 172
  source 1..36: mol_type = unassigned DNA

SEQ ID NO: 828 - skipped

SEQ ID NO: 829 - protein, 11 aa, unidentified
  VARIANT 4: note = Any amino acid
  VARIANT 5: note = Any amino acid
  VARIANT 7: note = Any amino acid
  VARIANT 9: note = Any amino acid
  VARIANT 10: note = Any amino acid
YNPXXDXGXXN

SEQ ID NO: 830 - DNA, 3648 bp, Alphatorquevirus sp.
  source 1..3648: mol_type = genomic DNA
cgtcactaaccacgtgactcccacaggccaaccacagtgtacgtgattcacttcctgggagtggtttacattataatataagcaactgcacttccgaatggctgagttttccacgcccgtccgcagcgagaacaccacggaggggagtccgcgcgtcccgtgggcgggtgccgaaggtgagtttacacaccgcagtcaaggggcaattcgggcacgggactggccgggctatgggcaaggctcttaaaaagctatgtttcttggtaggccgtaccgaaagaaaaggaaactgctactgctaccactgcattctacaccgaaaactagccgggttatgagctggtctaggcctgtacataatgccacaggcattgaaagaaactggtgggagtcctgtcttagatcccacgcaagttcttgtggctgcggtaattttgttaatcatattaatgtactggctaatcggtatggctttgctggttccacggagacgccgggtaatcctcggccgaggcccccggtactgagctccaccaccagcactcctaccgatcaatccagaccagctctaccatggcatggggatactggtggagaaggcgcttctggagaccccgcaggagatggagaacgtggcgccgcagaaggagactacggcccagaagatctagacgcacttttcgacgcactcgacgaagagtaaggaggcgacggtgggggaggcgtgcacgcaggcggggatggcgacgcaggacttatattagagccaggcgacgcaggagacgaaaaagacttgtactgactcagtggcatcccgcagttagaagaaaatgtaaaattacaggctacatgcctatagtatactgtggacatggcagagctagttttaactatgcctggcactctgatgactgtataaaacaaccactaccctttggaggctcactatctacagtgtccttcaacctaaaagtactatttgacgaaaaccaaagaggactaaacaaatggagctacccaaatgaccaactagacctcgccagatacaaaggctgtagactaacattttacagaaaaaaaaacacagactacatagctcaatatgacatatcagaaccttatcaactagacaaatatagctgtgcaaactatcacccctcaaaaatgatgtttgcaaaaaacaaaattttaattcctagctatgatacaaaacctagaggcagacaaagagttagagttagaatagggccccctaaactatttacagacaagtggtacagtcaatcagacttatgcaaggtaaaccttgtgtcacttgcggtttctgcggcttcctttctccacccattcggctcaccacaaactgccaacttttgtgcaaccttccaggtgctgcaaccgttctactaccaggctataggcattagttctacaaaacactcagaagttatagacattttatataagaaaaatacatactggcaaagcaacattacctcttggtttttaactaatgttaaaaacccaaaaaatatgtccacaaaaatgtttgaggacattaatgttaaatcaaacaaagacagtaattatgactggtttccatttaccccatacactacagaaaactattcaaaaattcaaaatgcagctcaagaatactggaaatatttaactagtgaccacccacaagctactaatagcaatgaaggcctagtacaaccatggactaatgccactataaaacaatatgaataccacctcggtatgtttagtcctatatttataggacctaccagagctaaaactaaatttaaaacagcatactttgactgcacttataacccactactagacaaaggaatgggaaacagaatatggtatcaatacgcaaccaaagctgacacacaaatatcaaaaacagggtgctactgcatgttagaagacattccaatatatgcagcattttatggatacgtagactttatagaaatggaaataggtaaaggacaagacattaaagagaacggacttatttgctgcatatgtagatacacagaccccccaatgtacaatgaacaacatccagacatgggatttgtattttataacactaactttggaaatggaaaatggatagatggacggggcgacatacctacttactggatgcaaagatggagacctgttgtattatttcaaactgatgttattagagacttagtagaaactggaccttttagttacaaagatgacctagcaaatacctcactgactatgaaatatgaattctattttacctggggcggaaaccaggcgtaccaccagacaatcaaaaacccttgtaaagacgaaggtaccggaccccatagacagcctagagacgtacaagttacggacccgacaaccgtgggacctgaatatgtgttccacgcgtgggactggagacggggcttccttagcgagcgagctctcagacgcatgttcgaaaaacctctcaactatgatgagtattctaaaaaaccaaaaagacctagaatatttcctccaacagaaacagagtcccgaaaccaagagctcgaagaaagctcgctttcagaggaagaaaagtcgctactctccacagaagagatccagaaagaggagatacagcgacagttcaagcgacagctcaagcgacagctgcgcctcgggcagcagctcaaactcctccaacaacaactcctcaagacgcaagcgggcctgcacctaaaccccctttcatatttcccgcaataaataaagtgtacctgttcccagacagagctccaaaacctaaacccacctctggagactgggaaacagagtatgcagcttgcagtgcctttgacagacccgctagaaccaaccttagctcacccccttactacccaggagtacctactccctggcaagtaaaattcagccttaaatttcaataaagtgcatttttactacagctgggccgtgggagtttcacttgtcggtgtctacctcttaaggtcactaagcactccgagcgcagcgaggagtgcgacccttaaccctgggtcaacgccttcggagccgcgcgctacgccttcggctgcgcgcggcacctcagacccccgctcgtgctgacgcgcttgcgcgcgtcagaccacttcgggctcgcgggggtcgggaactttgctaacagactccgaggtgccattggacacagagtgggcgttcagcaacgaaagtgagtggggccagacttcgccataaggcctttatcttcttgccatttgtcagtataaggggttgccataggcttcggcctcaattttaggccttccggactaccaaaatggccgatttagtgacgtcacggcggccattttaagtaaggcggaagtaactccactatttacaaaatggcggcggagcacttccggcttgcccaaaatggcggcaaaaaacatccgggtcaaaggtcgttaccacgtcacaagtcacgtgggagggtggtgctgtaaacccggaagcaatcctctcacgtggctagtcacgtgactaacacgtcacacccgccattttgttttacaaaatggccgacttccttccgcttttttaaaaataacggctcagcggcggcgcgcgcgctacgcg

SEQ ID NO: 831 - protein, 122 aa, Alphatorquevirus sp.
MSWSRPVHNATGIERNWWESCLRSHASSCGCGNFVNHINVLANRYGFAGSTETPGNPRPRPPVLSSTTSTPTDQSRPALPWHGDTGGEGASGDPAGDGERGAAEGDYGPEDLDALFDALDEE

SEQ ID NO: 832 - protein, 262 aa, Alphatorquevirus sp.
MSWSRPVHNATGIERNWWESCLRSHASSCGCGNFVNHINVLANRYGFAGSTETPGNPRPRPPVLSSTTSTPTDQSRPALPWHGDTGGEGASGDPAGDGERGAAEGDYGPEDLDALFDALDEEQSKTLVKTKVPDPIDSLETYKLRTRQPWDLNMCSTRGTGDGASLASELSDACSKNLSTMMSILKNQKDLEYFLQQKQSPETKSSKKARFQRKKSRYSPQKRSRKRRYSDSSSDSSSDSCASGSSSNSSNNNSSRRKRACT

SEQ ID NO: 833 - protein, 256 aa, Alphatorquevirus sp.
MSWSRPVHNATGIERNWWESCLRSHASSCGCGNFVNHINVLANRYGFAGSTETPGNPRPRPPVLSSTTSTPTDQSRPALPWHGDTGGEGASGDPAGDGERGAAEGDYGPEDLDALFDALDEENRVPKPRARRKLAFRGRKVATLHRRDPERGDTATVQATAQATAAPRAAAQTPPTTTPQDASGPAPKPPFIFPAINKVYLFPDRAPKPKPTSGDWETEYAACSAFDRPARTNLSSPPYYPGVPTPWQVKFSLKFQ

SEQ ID NO: 834 - protein, 178 aa, Alphatorquevirus sp.
MSWSRPVHNATGIERNWWESCLRSHASSCGCGNFVNHINVLANRNRVPKPRARRKLAFRGRKVATLHRRDPERGDTATVQATAQATAAPRAAAQTPPTTTPQDASGPAPKPPFIFPAINKVYLFPDRAPKPKPTSGDWETEYAACSAFDRPARTNLSSPPYYPGVPTPWQVKFSLKFQ

SEQ ID NO: 835 - protein, 733 aa, Alphatorquevirus sp.
MAWGYWWRRRFWRPRRRWRTWRRRRRLRPRRSRRTFRRTRRRVRRRRWGRRARRRGWRRRTYIRARRRRRRKRLVLTQWHPAVRRKCKITGYMPIVYCGHGRASFNYAWHSDDCIKQPLPFGGSLSTVSFNLKVLFDENQRGLNKWSYPNDQLDLARYKGCRLTFYRKKNTDYIAQYDISEPYQLDKYSCANYHPSKMMFAKNKILIPSYDTKPRGRQRVRVRIGPPKLFTDKWYSQSDLCKVNLVSLAVSAASFLHPFGSPQTANFCATFQVLQPFYYQAIGISSTKHSEVIDILYKKNTYWQSNITSWFLTNVKNPKNMSTKMFEDINVKSNKDSNYDWFPFTPYTTENYSKIQNAAQEYWKYLTSDHPQATNSNEGLVQPWTNATIKQYEYHLGMFSPIFIGPTRAKTKFKTAYFDCTYNPLLDKGMGNRIWYQYATKADTQISKTGCYCMLEDIPIYAAFYGYVDFIEMEIGKGQDIKENGLICCICRYTDPPMYNEQHPDMGFVFYNTNFGNGKWIDGRGDIPTYWMQRWRPVVLFQTDVIRDLVETGPFSYKDDLANTSLTMKYEFYFTWGGNQAYHQTIKNPCKDEGTGPHRQPRDVQVTDPTTVGPEYVFHAWDWRRGFLSERALRRMFEKPLNYDEYSKKPKRPRIFPPTETESRNQELEESSLSEEEKSLLSTEEIQKEEIQRQFKRQLKRQLRLGQQLKLLQQQLLKTQAGLHLNPLSYFPQ

SEQ ID NO: 836 - protein, 191 aa, Alphatorquevirus sp.
MAWGYWWRRRFWRPRRRWRTWRRRRRLRPRRSRRTFRRTRRRTIKNPCKDEGTGPHRQPRDVQVTDPTTVGPEYVFHAWDWRRGFLSERALRRMFEKPLNYDEYSKKPKRPRIFPPTETESRNQELEESSLSEEEKSLLSTEEIQKEEIQRQFKRQLKRQLRLGQQLKLLQQQLLKTQAGLHLNPLSYFPQ

SEQ ID NO: 837 - protein, 107 aa, Alphatorquevirus sp.
MAWGYWWRRRFWRPRRRWRTWRRRRRLRPRRSRRTFRRTRRRKQSPETKSSKKARFQRKKSRYSPQKRSRKRRYSDSSSDSSSDSCASGSSSNSSNNNSSRRKRACT

SEQ ID NO: 838 - DNA, 3704 bp, Alphatorquevirus sp.
  source 1..3704: mol_type = genomic DNA
ccccgaagtccgtcactaaccacgtgactcccacaggccaatcagatgctatgtcgtgcacttcctgggctgtgtctacgtcctcatataagtaactgcacttccgaatggctgagttttccacgcccgtccgcagcggcagcaccacggagggtgatccccgcgtcccgtgggcgggtgccggaggtgagtttacacaccgcagtcaaggggcaattcgggcacgggactggccgggctatgggcaaggctcttaaaaagctatgttcttcggtaggtgctggagaaagaaaaggaaagtgcttctgcaagatctgtcaactccaccgaaaaaacctgctatgagtgtgtggcttcctcccatagacaatgttaccgagcgtgagaggagctggctctctagcattcttcagtctcacagagctttttgtgggtgccatgatgctatctatcatcttagcagtctggctgctcgctttaatatgcaaccagggccgtcgccgggtggtgattctaggccgccgcgaccgccactaagacgcctgcccgcgctcccgggtcccagagacccccctagcgacaccaacaaccgcaggtcatggcctactggggatggtggagacggaggcgctggccaaggcgcaggtggaggcgctaccgctaccgaagaagactaccgcgccgaagacctagacgagctgtacgccgccctcgaaggagacgagtaaggaggcgccgcggtagggggtggtacagagggcgacgctactcccgcagacggtacagacgtagatatgtgaggcgaaagagaaagactctagtttggagacagtggcagcctcaaaatatcagaaaatgcaggatcaggggcataattcccatcctgatatgcggacacgggaggggggccagaaactatgcgctccacagcgacgacataaccccccagaacacccccttcgggggaggactgagcaccacctcctggagcctaaaagtgctatatgaccagcacaccaggggactcaacaggtggtctgccagtaacgagagcctagaccttgccagatacaatggctgtagtttcactttctacagagacaaaaagactgactttatagtgacctatgacacctctgctccctacaaactagacaaatacagctcccccagctaccacccagggtccatgatgctcatgacaaaacacaaaatcctgatccccagttttgacacaaaacccaaaggtcctgccaaaattagagtcagaatcaagccccccaaaatgttcttagataaatggtacactcaagacgacctctgttccgttaatcttgtgtcacttgcggttagcgcagcttcctttacacatccgttctgcccaccactaactgacactccttgtgtaacgctgcaggtgttgaaagacttctactacacaaccataggctactcctctaatgcagacaaagtagagtctgtattcactaacactctctacaaacactgctgctactatcagtcctttctcaccactcaatttatagccaaaatcactcgcacaccagatggacaaccagtagccacattctctcctcctacctctttccctggcacaactgtaacaaaaagttccatagaatcatttaaccaatgggtaacttccacaggtacaagtggctggctaacaaatgcaaaccaacactttcatttctgtaactataaaccagatgccacaaagctaaaatggctcagacagtactactttgactgggaaacatacaaattagcagatgtaaagccagacggccttacaccctcagtaaactggtatgagtacagaataggcctctttagtcctattttcctgagccccttcagatctagcagtctagactttcccagagcctaccaggatgtgaactacaaccccctggtagacaaaggagtgggcaacatcatatggttccaatacaacacaaaaccagacacacagctgtcagtacccagctgcaagtgtgtcatagaagacaaacccctatgggcagccttctatggctacagtgactttgtacaacaagagataggagactacacagacgcagaggccgtgggcttcgtctgtgtcatctgtccatacaccaaaccccctctaaaaaacccagacaaccccatgcaagggttcatattctatgacagcctttttggcaatggcaagtggatagatggcacggggcacgtccccctttactggcagagcaggtggaggccagagatgctcttccaagaaaacaccatgagagacatcacactatctgggcccttcagctacaaggacgactataagaactgtgtactgacttgcaaatacaaatttaactttcgattcgggggcaatcttctccacgaacagacgatcagaaacccatgccccacggacggacatcccagtaccggtagacagcctagagacgtacaagtggttgacccgatcaaagtgggcccccggttcgtgttccactcctgggactggcgcagaggctaccttagcccagcagctctcaaaagaattggagagcaaccgctcgattatgaagcttattcgtaccgcccaaagagacctagaatctttcctcccacagaaggagaccagctcgcccgaagtcgagaagaagactcattttcagaggaagaaagtccccatatctcgttcgaagaggggcaggaaccgaaagcccaggcggtacagcagcacctcctccgacacctcagaaagcagcgagaactccgaaagcgactccgagccctgttccaaagcctccaaaagacgcaggcgggtctccacgtaaatccattattattcaaccagcctgcaatcaggttctgatgttcccagagatggggcctaagccagctcccactgcccaagactggcagtgcgaatacgagacatgtaagcactgggatagaccccccagaaagtttctcacagacccccctttctatccctgggcccctactacttacaatgtatctttcaagctaaacttcaaataaactaggccgtgggagtctcacttgtcggtgtctacctcttaaggtcactaagcactccgagcgtcagcgaggagtgcgacccttccccctggtgcaacgccctcggcggccgcgcgctacgccttcggctgcgcgcggcacctcggacccccgctcgtgctgacgcgctcgcgcgcgtcagaccacttcgggctcgcgggggtcgggaaatttgctaaacagactccgagttgccattggacacaggagctgtgaatcagtaacgaaagtgagtggggccagacttcgccataaggcctttatcttcttgccatttgtccgtgaggaggggtcgccaagacgcggaccccgttttcggaccttccgaactaccaaaatggccgattcagtgacgtcacggcagccattttgtgtaagcaccgcccaggacagacgtcacagttcaaaggtcatcctcgagcggaacttacagaaaatggcggtcaattgcttccgggtcaaaggtcacgcctacgtcataagtcacgtggtggaggctactgcgcatacacggaagtaggccccgccacgtgaccgaccacgtgggtgctgcgtcacggccgccattttgtatcacaaaatggccgacttccttcctctttttcaaa

SEQ ID NO: 839 - protein, 128 aa, Alphatorquevirus sp.
MSVWLPPIDNVTERERSWLSSILQSHRAFCGCHDAIYHLSSLAARFNMQPGPSPGGDSRPPRPPLRRLPALPGPRDPPSDTNNRRSWPTGDGGDGGAGQGAGGGATATEEDYRAEDLDELYAALEGDE

SEQ ID NO: 840 - protein, 272 aa, Alphatorquevirus sp.
MSVWLPPIDNVTERERSWLSSILQSHRAFCGCHDAIYHLSSLAARFNMQPGPSPGGDSRPPRPPLRRLPALPGPRDPPSDTNNRRSWPTGDGGDGGAGQGAGGGATATEEDYRAEDLDELYAALEGDERSETHAPRTDIPVPVDSLETYKWLTRSKWAPGSCSTPGTGAEATLAQQLSKELESNRSIMKLIRTAQRDLESFLPQKETSSPEVEKKTHFQRKKVPISRSKRGRNRKPRRYSSTSSDTSESSENSESDSEPCSKASKRRRRVST

SEQ ID NO: 841 - protein, 265 aa, Alphatorquevirus sp.
MSVWLPPIDNVTERERSWLSSILQSHRAFCGCHDAIYHLSSLAARFNMQPGPSPGGDSRPPRPPLRRLPALPGPRDPPSDTNNRRSWPTGDGGDGGAGQGAGGGATATEEDYRAEDLDELYAALEGDERRPARPKSRRRLIFRGRKSPYLVRRGAGTESPGGTAAPPPTPQKAARTPKATPSPVPKPPKDAGGSPRKSIIIQPACNQVLMFPEMGPKPAPTAQDWQCEYETCKHWDRPPRKFLTDPPFYPWAPTTYNVSFKLNFK

SEQ ID NO: 842 - protein, 762 aa, Alphatorquevirus sp.
MAYWGWWRRRRWPRRRWRRYRYRRRLPRRRPRRAVRRPRRRRVRRRRGRGWYRGRRYSRRRYRRRYVRRKRKTLVWRQWQPQNIRKCRIRGIIPILICGHGRGARNYALHSDDITPQNTPFGGGLSTTSWSLKVLYDQHTRGLNRWSASNESLDLARYNGCSFTFYRDKKTDFIVTYDTSAPYKLDKYSSPSYHPGSMMLMTKHKILIPSFDTKPKGPAKIRVRIKPPKMFLDKWYTQDDLCSVNLVSLAVSAASFTHPFCPPLTDTPCVTLQVLKDFYYTTIGYSSNADKVESVFTNTLYKHCCYYQSFLTTQFIAKITRTPDGQPVATFSPPTSFPGTTVTKSSIESFNQWVTSTGTSGWLTNANQHFHFCNYKPDATKLKWLRQYYFDWETYKLADVKPDGLTPSVNWYEYRIGLFSPIFLSPFRSSSLDFPRAYQDVNYNPLVDKGVGNIIWFQYNTKPDTQLSVPSCKCVIEDKPLWAAFYGYSDFVQQEIGDYTDAEAVGFVCVICPYTKPPLKNPDNPMQGFIFYDSLFGNGKWIDGTGHVPLYWQSRWRPEMLFQENTMRDITLSGPFSYKDDYKNCVLTCKYKFNFRFGGNLLHEQTIRNPCPTDGHPSTGRQPRDVQVVDPIKVGPRFVFHSWDWRRGYLSPAALKRIGEQPLDYEAYSYRPKRPRIFPPTEGDQLARSREEDSFSEEESPHISFEEGQEPKAQAVQQHLLRHLRKQRELRKRLRALFQSLQKTQAGLHVNPLLFNQPAIRF

SEQ ID NO: 843 - protein, 199 aa, Alphatorquevirus sp.
MAYWGWWRRRRWPRRRWRRYRYRRRLPRRRPRRAVRRPRRRRTIRNPCPTDGHPSTGRQPRDVQVVDPIKVGPRFVFHSWDWRRGYLSPAALKRIGEQPLDYEAYSYRPKRPRIFPPTEGDQLARSREEDSFSEEESPHISFEEGQEPKAQAVQQHLLRHLRKQRELRKRLRALFQSLQKTQAGLHVNPLLFNQPAIRF

SEQ ID NO: 844 - protein, 110 aa, Alphatorquevirus sp.
MAYWGWWRRRRWPRRRWRRYRYRRRLPRRRPRRAVRRPRRRRKETSSPEVEKKTHFQRKKVPISRSKRGRNRKPRRYSSTSSDTSESSENSESDSEPCSKASKRRRRVST

SEQ ID NO: 845 - DNA, 3653 bp, Alphatorquevirus sp.
  source 1..3653: mol_type = genomic DNA
  misc_difference 2949: note = a, c, t, g, unknown or other
  misc_difference 2950: note = a, c, t, g, unknown or other
  misc_difference 2951: note = a, c, t, g, unknown or other
  misc_difference 2952: note = a, c, t, g, unknown or other
  misc_difference 2953: note = a, c, t, g, unknown or other
  misc_difference 2954: note = a, c, t, g, unknown or other
  misc_difference 2955: note = a, c, t, g, unknown or other
  misc_difference 2956: note = a, c, t, g, unknown or other
  misc_difference 2957: note = a, c, t, g, unknown or other
  misc_difference 2958: note = a, c, t, g, unknown or other
  misc_difference 2959: note = a, c, t, g, unknown or other
  misc_difference 2960: note = a, c, t, g, unknown or other
  misc_difference 2961: note = a, c, t, g, unknown or other
  misc_difference 2962: note = a, c, t, g, unknown or other
  misc_difference 2963: note = a, c, t, g, unknown or other
  misc_difference 2964: note = a, c, t, g, unknown or other
  misc_difference 2965: note = a, c, t, g, unknown or other
  misc_difference 2966: note = a, c, t, g, unknown or other
ccaaccagagtctatgtcgtgcacttcctgggcatggtctacgtaataatataaagcggtgcacttccgaatggctgagttttccacgcccgtccgcagcgagatcgcgacggaggagcgatcgagcgtcccgagggcgggtgccggaggtgagtttacacaccgcagtcaaggggcaattcgggctcgggactggccgggctatgggcaaggctcttaaaaagccatgtttctcggtaaactttacaggcagaaaaggaaactgctactgcagcctgtgcgtgctccacagacgccatcttccatgagctctacctggcgagtgccccgcggcgatgtctccgcccgcgagctatgttggtaccgctcagttcgagagagccacgatgctttttgtggctgtcgtgatcctgtttttcatctttctcgtctggctgcacgttctaaccatcagggacctccgacgccccccacggacgagcgcccgtcggcgtctaccccagtgaggcgcctgctgccgctgccctcctaccccggcgagggtccccaggctagatggcctggtggggatggagaaggcgctggtggcgcccgcggaggcgctggagatggcggcgcccgcgcaggcgaagaagagtaccggcccgaagacctcgacgagctgttcgacgctatcgaacaagaacagtaaggagacggaggcgagggtggcggaggggctacaggcgccgttacagactgagacgctaccgtagaaggggcaggcgacgcaaaaaaatagtactgactcagtggaacccccagactgtcagaaagtgctttatcagaggactgatgccagtactatgggcgggcatgggcacggggggccacaactacgccgtccgctcagatgactttgtggtagacagaggcttcgggggctccttcgccacagaaactttctccctgagggtcctctttgaccagtaccagagaggatttaataggtggtctcacaccaacgaagacctagacctggcccgctacacgggctgcaaatggacattttacagacaccaagacacagactttatagtgtactttacaaacaatccccccatgaaaaccaaccagcacacagcccctctcacaactccaggcatgctcatgaggagcaagtataaaatactagtgcccagttttaaaacaagaccaaagggcagaaaaacagtgtcagtgagagttagaccccccaaactgtttcaggacaaatggtatactcaacaggacctctgtccagtacccctcgtccaactgaacgtgaccgcagcggatttcacacatccgttcggctcaccactaactgacacgccttgcataagattccaagttttagggaacttatacaacaagtgcctaaatatagatcttccgcaatttgatgaggacggtgagatactcacttcaacaccttataacagagaaaacaaagaagatcttaaaaagctttataaaactctatttgtagatgaacacgcaggcaattattggcagacattcttaaccaacacaatggtaaagtcacacatagatgcaaaccaagcaaagacatacgatcaagaaaaaactgctgcagaacaaggtaaagaccccttcccaacaaacccaccaaaagaccaattcactacctggaacaagaaactagtagaccctagagacagcaactttctctttgccacatatcacccaaaaaacattaaaaaagctataaaaaccatgagagacaacaactttgctctcaccacaggcaaaaatgacatatatggagactacaccgcggcctacaccagaaacacccacatgctagactactacctaggcttttatagccccatatttctttccagcggtaggtccaacacagagttctggaccgcctacagagacatagtatataatcccctcttagacaaaggcacaggcaacatgatctggttccaatatcacacaaaaacagacaatatatacaaaaaaccagagtgccactgggagatactagacatgcccctgtgggccctctgcaacgggtatgtagagtacctagagagccaaataaagtacggggacatcctagtagagggcaaagtcctcatcagatgcccctacaccaaacccgcactggtagaccccaataacagcctagctggttacgtggtattcaacaccaccttcggccagggaaaatggatagatggcaaaggctacatccccctacacgagaggagcaagtggtacgtcatgctcagataccagaccgacgtactccatgacatagtgacttgtggaccctggcagtacagagacgataacaaaaactctcagctaatagccaagtacagattcaagttctactggggaggtaacatggtacattctcaggtcatcagaaacccgtgcaaagacacccaagtatccggaccccgtcgacagcctcgcgaagtacaagtcgttgacccgcaactcattacgccgccgtgggtcctccactcgttcgaccagagacgaggaatgtttactgcaggagctatcaaacgtctgctcaagcaaccaatacctggcgagtatgctcctacaccactcagggtcccgctcctctttccctcctcagagttccagcgagagggagaagatgcagaaagcggctcaggttcaccacccaagagaccgcgactctggcaggaagaggccaaccagacgcaaacggagtcctcggaggggccggcggagacgacgagggagctcctcgagcgaaagctcagagagcagcgagtcctcaacctccaactccagcatgtcgcagtacaactcgccaaaacccaagcgaacctccacataaaccccctattatactcccagccttaaacaaagtgtatctattcccccctgacaagcccactcccatacagnnnnnnnnnnnnnnnnnnaacacagagttcgaagcctgccaggccttcgacagaccacctagaaaatacctctcagacacacctacctacccttggctccccgtccccaatcctgaaataaaggtcagctttaagctcggtttcaaatcttacaaggccgtgggagtttcactggtcggtgtctacctcttaaggtcactaagcactccgagcgtcagcgaggagtgcgacccttccccctggtgcaacgccctcggcggccgcgcgctacgccttcggctgcgcgcggcacctcggacccccgctcgtgctgacgcgctcgcgcgcgtcagaccacttcgggctcgcgggggtcgggaattttgctaaacagactccgagttgccattggacactgtagctgtgaatcagtaacgaaagtgagtggggccagacttcgccataaggcctttatcttcttgccattggtccgtgtagggggtcgccataggcttcgggttcggttttaggccttccggactacaaaaatggcggatttagtgacgtcacggccgccattttaagtaggtgccgtccaggactgctgttccgggtcacagggcatcctcggcggaacttacacaaaatggcggtcaaaaacatccgggtcaaaggtcgcagctacgtcataagtcacgtgcaggggtcctgctgcgtcatatgcgg

SEQ ID NO: 846 - protein, 128 aa, Alphatorquevirus sp.
MSSTWRVPRGDVSARELCWYRSVRESHDAFCGCRDPVFHLSRLAARSNHQGPPTPPTDERPSASTPVRRLLPLPSYPGEGPQARWPGGDGEGAGGARGGAGDGGARAGEEEYRPEDLDELFDAIEQEQ

SEQ ID NO: 847 - protein, 279 aa, Alphatorquevirus sp.
MSSTWRVPRGDVSARELCWYRSVRESHDAFCGCRDPVFHLSRLAARSNHQGPPTPPTDERPSASTPVRRLLPLPSYPGEGPQARWPGGDGEGAGGARGGAGDGGARAGEEEYRPEDLDELFDAIEQEQSSETRAKTPKYPDPVDSLAKYKSLTRNSLRRRGSSTRSTRDEECLLQELSNVCSSNQYLASMLLHHSGSRSSFPPQSSSEREKMQKAAQVHHPRDRDSGRKRPTRRKRSPRRGRRRRRGSSSSESSESSESSTSNSSMSQYNSPKPKRTST

SEQ ID NO: 848 - protein, 378 aa, Alphatorquevirus sp.
  VARIANT 257: note = Any amino acid
  VARIANT 258: note = Any amino acid
  VARIANT 259: note = Any amino acid
  VARIANT 260: note = Any amino acid
  VARIANT 261: note = Any amino acid
  VARIANT 262: note = Any amino acid
MSSTWRVPRGDVSARELCWYRSVRESHDAFCGCRDPVFHLSRLAARSNHQGPPTPPTDERPSASTPVRRLLPLPSYPGEGPQARWPGGDGEGAGGARGGAGDGGARAGEEEYRPEDLDELFDAIEQEQSYQTSAQATNTWRVCSYTTQGPAPLSLLRVPARGRRCRKRLRFTTQETATLAGRGQPDANGVLGGAGGDDEGAPRAKAQRAASPQPPTPACRSTTRQNPSEPPHKPPIILPALNKVYLFPPDKPTPIQXXXXXXNTEFEACQAFDRPPRKYLSDTPTYPWLPVPNPEIKVSFKLGFKSYKAVGVSLVGVYLLRSLSTPSVSEECDPSPWCNALGGRALRLRLRAAPRTPARADALARVRPLRARGGREFC

SEQ ID NO: 849 - protein, 269 aa, Alphatorquevirus sp.
  VARIANT 148: note = Any amino acid
  VARIANT 149: note = Any amino acid
  VARIANT 150: note = Any amino acid
  VARIANT 151: note = Any amino acid
  VARIANT 152: note = Any amino acid
  VARIANT 153: note = Any amino acid
MSSTWRVPRGDVSARELCWSYQTSAQATNTWRVCSYTTQGPAPLSLLRVPARGRRCRKRLRFTTQETATLAGRGQPDANGVLGGAGGDDEGAPRAKAQRAASPQPPTPACRSTTRQNPSEPPHKPPIILPALNKVYLFPPDKPTPIQXXXXXXNTEFEACQAFDRPPRKYLSDTPTYPWLPVPNPEIKVSFKLGFKSYKAVGVSLVGVYLLRSLSTPSVSEECDPSPWCNALGGRALRLRLRAAPRTPARADALARVRPLRARGGREFC

SEQ ID NO: 850 - protein, 782 aa, Alphatorquevirus sp.
MAWWGWRRRWWRPRRRWRWRRPRRRRRVPARRPRRAVRRYRTRTVRRRRRGWRRGYRRRYRLRRYRRRGRRRKKIVLTQWNPQTVRKCFIRGLMPVLWAGMGTGGHNYAVRSDDFVVDRGFGGSFATETFSLRVLFDQYQRGFNRWSHTNEDLDLARYTGCKWTFYRHQDTDFIVYFTNNPPMKTNQHTAPLTTPGMLMRSKYKILVPSFKTRPKGRKTVSVRVRPPKLFQDKWYTQQDLCPVPLVQLNVTAADFTHPFGSPLTDTPCIRFQVLGNLYNKCLNIDLPQFDEDGEILTSTPYNRENKEDLKKLYKTLFVDEHAGNYWQTFLTNTMVKSHIDANQAKTYDQEKTAAEQGKDPFPTNPPKDQFTTWNKKLVDPRDSNFLFATYHPKNIKKAIKTMRDNNFALTTGKNDIYGDYTAAYTRNTHMLDYYLGFYSPIFLSSGRSNTEFWTAYRDIVYNPLLDKGTGNMIWFQYHTKTDNIYKKPECHWEILDMPLWALCNGYVEYLESQIKYGDILVEGKVLIRCPYTKPALVDPNNSLAGYVVFNTTFGQGKWIDGKGYIPLHERSKWYVMLRYQTDVLHDIVTCGPWQYRDDNKNSQLIAKYRFKFYWGGNMVHSQVIRNPCKDTQVSGPRRQPREVQVVDPQLITPPWVLHSFDQRRGMFTAGAIKRLLKQPIPGEYAPTPLRVPLLFPSSEFQREGEDAESGSGSPPKRPRLWQEEANQTQTESSEGPAETTRELLERKLREQRVLNLQLQHVAVQLAKTQANLHINPLLYSQP

SEQ ID NO: 851 - skipped

SEQ ID NO: 852 - protein, 204 aa, Alphatorquevirus sp.
MAWWGWRRRWWRPRRRWRWRRPRRRRRVPARRPRRAVRRYRTRTVIRNPCKDTQVSGPRRQPREVQVVDPQLITPPWVLHSFDQRRGMFTAGAIKRLLKQPIPGEYAPTPLRVPLLFPSSEFQREGEDAESGSGSPPKRPRLWQEEANQTQTESSEGPAETTRELLERKLREQRVLNLQLQHVAVQLAKTQANLHINPLLYSQP

SEQ ID NO: 853 - protein, 148 aa, Alphatorquevirus sp.
MAWWGWRRRWWRPRRRWRWRRPRRRRRVPARRPRRAVRRYRTRTELSNVCSSNQYLASMLLHHSGSRSSFPPQSSSEREKMQKAAQVHHPRDRDSGRKRPTRRKRSPRRGRRRRRGSSSSESSESSESSTSNSSMSQYNSPKPKRTST

SEQ ID NO: 854 - DNA, 3742 bp, Alphatorquevirus sp.
  source 1..3742: mol_type = genomic DNA
aaagtgctacgtcactaaccacgtgacacccacaggccaaccgaatgctatgtcgtgcacttcctgggccgggtctacgtcctcatataactacctgcacttccgaatggctgagttttccacgcccgtccgcagcggtgaagccacggagggagatcagcgcgtcccgagggcgggtgccgaaggtgagtttacacaccgaagtcaaggggcaattcgggctcgggactggccgggctatgggcaaggctctgaaaaaagcatgtttattggcaggcattacagaaagaaaagggcgctgccactgtgtgctgtgcgatcaacaaagaaggcttgcaaactactaatagtaatgtggaccccacctcgcaatgaccaacagtaccttaactggcaatggtactcaagtatacttagctcccacgctgctatgtgcgggtgtcccgacgttgttgctcattttaatcatcttgcttctgtgcttcgcgccccgcaaaatccacccccacccggtccccagcgaaacctgcccctccgacggctgccggctctcccggctgcgccagaggcgcccggagatagagcaccatggcctatggctggtggcgccggaggagaagacggtggcgcaggtggagacgcagaccatggaggcgccgctggaggaccagaagacgcagacctgttagacgccgtggccgccgcagaaacgtaaggagacgccgcagaggagggaggtggaggaggaggtacaggagatggaaaagaaagggcagacgcagaaaaaaagctaaaataataataagacaatggcaacctaactacagaaggagatgtaacatagtaggctatattcctgtactgatatgtggcgaaaatactgtcagcagaaactatgccacacactcagacgatactaactacccaggaccctttggggggggtatgactacagacaaatttaccttaagaattctgtatgacgagtacaaaaggtttatgaactattggacagcatctaatgaagacctagacctctgtagatatctaggagtaaacctgtacttttttagacacccagaagtagactttattataaaaataaataccatgcccccttttctagacacagaactaacagctcctagcatacacccaggaatgctagccttagacaaaagagcaagatggatacctagcttaaaatctagaccaggaaaaaaacactatattaaaataagagtaggggcgcctaaaatgttcacagataaatggtacccccaaacagatctttgtgacatggtgctgctaactgtctatgcaaccgcagcggatatgcaatatccgttcggctcaccactaactgactctgtggttgtgaacttccaggttctgcaatccatgtatgatgaaaccattagcatattaccagatcaaaaggagaaaagaataacgctgctcactagtatagccttttataacaccacacaaactatagcccaattaaagccatttatagatgcaggcaatatgacttcaactacaacagcaacaacatggggatcatacataaacacaaccaaatttaatacagcagccactacaacatacacatacccaggcagtactacaactacagtaactatgttaacttgtaatgactcctggtacagaggaacagtatataacgaccaaattaaaaatttaccaaaggaagcagctcaattatacttaaaagcaacaaaaaccttactaggaaacaccttcacaaatgacgaccacacactagaataccatggaggactgtacagctcaatttggctgtcccccggcagatcttactttgaaacaccaggagcatacacagacataaaatacaacccatttacagacagaggagaaggaaacatgctatggatagactggctaagcaaaaaaaatatgaactatgacaaactacaaagtaaatgtttaatatcagacctacctttatgggcagcagcatatggatatttagaattttgtgcaaaaagtacaggagaccaaaatatacacatgaatgccagactactaataagaagtccctttacagacccccaactactagtacacacaaaccccacaaaaggctttgttccctactctttaaactttggaaatggtaaaatgccaggaggtagtagtaatgttcctattagaatgagagctaaatggtatccaacattgtttcaccagcaagaagtactagaggccttagcacagtcaggcccctttgcataccactcagacattaaaaaagtatctctgggtatgaaataccgttttaagtggatctggggtggaaaccccgttcgccaacaggttgttagaaatccctgcaaagactcccactcctcggtcaatagagtccctagaagcttacaaatcgttgacccgaaatacaactcaccggaactcacattccatacgtgggacttcagacgtggcctctttggccagaaagctattgagagaatgcaacaacaaccaacaactactgacattttttcagcaggccgcaagagacccaggagggacaccgaggtgtaccactccagccaagaaggggagcaaaaagaaagcttacttttccccccagtcaagctcctcagacgagtccccccgtgggaagactcgcagcaggaggaaagcgggtcgcaaagctcagaggaagagacgcagaccgtctcccagcagctcaagcagcagctgcagcaacagcgaatcctgggagtcaaactcatactcctgttcaaccaagtccaaaaaatccaacaaaatcaagatatcaaccctaccttgttaccaagggggggggatctagcatccttatttcaaatagcaccataaacatgtttggagaccccaaaccttacaacccttccagtaatgactggaaagaggagtatgaggcctgtagaatatgggacagacccccaagaggcaatctaagagacacccccttttacccctgggcccccaaagaaaaccagtaccgtgtaaactttaaacttggatttcaataaagctaggccgtgggactttcacttgtcggtgtctgcttataaaagtaaccaagcactccgagcgaagcgaggagtgcgacccttgggggctcaacgacttcggagccgcgcgttaagccttcggctgcgcgcggcacctcagacccccgctcgtgctgacacgcttgcgcgtgtcagaccacttcgggctcgcgggggtcgggaaatttattaaacagactccgagttgccattggacacagtagtctatgaacagcaacgaaagtgagtggggccagacttcgccataaggcctttatcttcttgccatttgtcagtatagagggtcgccataggcttcggtctccattttaacctgtaaaaactaccaaaatggccgttccagtgacgtgacagccgccattttaagtagctgacgtcaaggattgacgtaaaggttaaaggtcatcctcggcggaagctacacaaaatggtggacaacatcttccgggtcaaaggtcgtgcacacgtcaaaagtcacgtggtggggacccgctgtaacccggaagtaggccccgtcacgtgatttgtcacgtgtgtacacgtcacagccgccattttgttttacaaaatggctgacttccttcctcttttttgaaaaaaggcgccaaaaaaggctccgccccccggcccccccc

SEQ ID NO: 855 - protein, 120 aa, Alphatorquevirus sp.
MWTPPRNDQQYLNWQWYSSILSSHAAMCGCPDVVAHFNHLASVLRAPQNPPPPGPQRNLPLRRLPALPAAPEAPGDRAPWPMAGGAGGEDGGAGGDADHGGAAGGPEDADLLDAVAAAET

SEQ ID NO: 856 - protein, 286 aa, Alphatorquevirus sp.
MWTPPRNDQQYLNWQWYSSILSSHAAMCGCPDVVAHFNHLASVLRAPQNPPPPGPQRNLPLRRLPALPAAPEAPGDRAPWPMAGGAGGEDGGAGGDADHGGAAGGPEDADLLDAVAAAETLLEIPAKTPTPRSIESLEAYKSLTRNTTHRNSHSIRGTSDVASLARKLLRECNNNQQLLTFFQQAARDPGGTPRCTTPAKKGSKKKAYFSPQSSSSDESPRGKTRSRRKAGRKAQRKRRRPSPSSSSSSCSNSESWESNSYSCSTKSKKSNKIKISTLPCYQGGGI

SEQ ID NO: 857 - protein, 289 aa, Alphatorquevirus sp.
MWTPPRNDQQYLNWQWYSSILSSHAAMCGCPDVVAHFNHLASVLRAPQNPPPPGPQRNLPLRRLPALPAAPEAPGDRAPWPMAGGAGGEDGGAGGDADHGGAAGGPEDADLLDAVAAAETPQETQEGHRGVPLQPRRGAKRKLTFPPSQAPQTSPPVGRLAAGGKRVAKLRGRDADRLPAAQAAAAATANPGSQTHTPVQPSPKNPTKSRYQPYLVTKGGGSSILISNSTINMFGDPKPYNPSSNDWKEEYEACRIWDRPPRGNLRDTPFYPWAPKENQYRVNFKLGFQ

SEQ ID NO: 858 - protein, 196 aa, Alphatorquevirus sp.
MWTPPRNDQQYLNWQWYSSILSSHAAMPQETQEGHRGVPLQPRRGAKRKLTFPPSQAPQTSPPVGRLAAGGKRVAKLRGRDADRLPAAQAAAAATANPGSQTHTPVQPSPKNPTKSRYQPYLVTKGGGSSILISNSTINMFGDPKPYNPSSNDWKEEYEACRIWDRPPRGNLRDTPFYPWAPKENQYRVNFKLGFQ

SEQ ID NO: 859 - protein, 766 aa, Alphatorquevirus sp.
MAYGWWRRRRRRWRRWRRRPWRRRWRTRRRRPVRRRGRRRNVRRRRRGGRWRRRYRRWKRKGRRRKKAKIIIRQWQPNYRRRCNIVGYIPVLICGENTVSRNYATHSDDTNYPGPFGGGMTTDKFTLRILYDEYKRFMNYWTASNEDLDLCRYLGVNLYFFRHPEVDFIIKINTMPPFLDTELTAPSIHPGMLALDKRARWIPSLKSRPGKKHYIKIRVGAPKMFTDKWYPQTDLCDMVLLTVYATAADMQYPFGSPLTDSVVVNFQVLQSMYDETISILPDQKEKRITLLTSIAFYNTTQTIAQLKPFIDAGNMTSTTTATTWGSYINTTKFNTAATTTYTYPGSTTTTVTMLTCNDSWYRGTVYNDQIKNLPKEAAQLYLKATKTLLGNTFTNDDHTLEYHGGLYSSIWLSPGRSYFETPGAYTDIKYNPFTDRGEGNMLWIDWLSKKNMNYDKLQSKCLISDLPLWAAAYGYLEFCAKSTGDQNIHMNARLLIRSPFTDPQLLVHTNPTKGFVPYSLNFGNGKMPGGSSNVPIRMRAKWYPTLFHQQEVLEALAQSGPFAYHSDIKKVSLGMKYRFKWIWGGNPVRQQVVRNPCKDSHSSVNRVPRSLQIVDPKYNSPELTFHTWDFRRGLFGQKAIERMQQQPTTTDIFSAGRKRPRRDTEVYHSSQEGEQKESLLFPPVKLLRRVPPWEDSQQEESGSQSSEEETQTVSQQLKQQLQQQRILGVKLILLFNQVQKIQQNQDINPTLLPRGGDLASLFQIAP

SEQ ID NO: 860 - protein, 216 aa, Alphatorquevirus sp.
MAYGWWRRRRRRWRRWRRRPWRRRWRTRRRRPVRRRGRRRNVVRNPCKDSHSSVNRVPRSLQIVDPKYNSPELTFHTWDFRRGLFGQKAIERMQQQPTTTDIFSAGRKRPRRDTEVYHSSQEGEQKESLLFPPVKLLRRVPPWEDSQQEESGSQSSEEETQTVSQQLKQQLQQQRILGVKLILLFNQVQKIQQNQDINPTLLPRGGDLASLFQIAP

SEQ ID NO: 861 - protein, 143 aa, Alphatorquevirus sp.
MAYGWWRRRRRRWRRWRRRPWRRRWRTRRRRPVRRRGRRRNAARDPGGTPRCTTPAKKGSKKKAYFSPQSSSSDESPRGKTRSRRKAGRKAQRKRRRPSPSSSSSSCSNSESWESNSYSCSTKSKKSNKIKISTLPCYQGGGI

SEQ ID NO: 862 - DNA, 3553 bp, Alphatorquevirus sp.
  source 1..3553: mol_type = genomic DNA
  misc_difference 1842: note = a, c, t, g, unknown or other
  misc_difference 3125: note = a, c, t, g, unknown or other
  misc_difference 3126: note = a, c, t, g, unknown or other
  misc_difference 3127: note = a, c, t, g, unknown or other
  misc_difference 3128: note = a, c, t, g, unknown or other
  misc_difference 3129: note = a, c, t, g, unknown or other
  misc_difference 3130: note = a, c, t, g, unknown or other
  misc_difference 3131: note = a, c, t, g, unknown or other
  misc_difference 3132: note = a, c, t, g, unknown or other
  misc_difference 3133: note = a, c, t, g, unknown or other
  misc_difference 3134: note = a, c, t, g, unknown or other
  misc_difference 3135: note = a, c, t, g, unknown or other
  misc_difference 3136: note = a, c, t, g, unknown or other
  misc_difference 3137: note = a, c, t, g, unknown or other
  misc_difference 3138: note = a, c, t, g, unknown or other
  misc_difference 3139: note = a, c, t, g, unknown or other
  misc_difference 3140: note = a, c, t, g, unknown or other
  misc_difference 3141: note = a, c, t, g, unknown or other
  misc_difference 3142: note = a, c, t, g, unknown or other
  misc_difference 3143: note = a, c, t, g, unknown or other
  misc_difference 3144: note = a, c, t, g, unknown or other
  misc_difference 3145: note = a, c, t, g, unknown or other
  misc_difference 3146: note = a, c, t, g, unknown or other
  misc_difference 3147: note = a, c, t, g, unknown or other
  misc_difference 3148: note = a, c, t, g, unknown or other
  misc_difference 3149: note = a, c, t, g, unknown or other
  misc_difference 3150: note = a, c, t, g, unknown or other
  misc_difference 3151: note = a, c, t, g, unknown or other
  misc_difference 3152: note = a, c, t, g, unknown or other
  misc_difference 3153: note = a, c, t, g, unknown or other
  misc_difference 3154: note = a, c, t, g, unknown or other
  misc_difference 3155: note = a, c, t, g, unknown or other
  misc_difference 3156: note = a, c, t, g, unknown or other
  misc_difference 3157: note = a, c, t, g, unknown or other
  misc_difference 3158: note = a, c, t, g, unknown or other
  misc_difference 3159: note = a, c, t, g, unknown or other
  misc_difference 3160: note = a, c, t, g, unknown or other
  misc_difference 3161: note = a, c, t, g, unknown or other
  misc_difference 3162: note = a, c, t, g, unknown or other
  misc_difference 3163: note = a, c, t, g, unknown or other
  misc_difference 3164: note = a, c, t, g, unknown or other
  misc_difference 3165: note = a, c, t, g, unknown or other
  misc_difference 3166: note = a, c, t, g, unknown or other
  misc_difference 3167: note = a, c, t, g, unknown or other
  misc_difference 3168: note = a, c, t, g, unknown or other
  misc_difference 3169: note = a, c, t, g, unknown or other
  misc_difference 3170: note = a, c, t, g, unknown or other
  misc_difference 3171: note = a, c, t, g, unknown or other
  misc_difference 3172: note = a, c, t, g, unknown or other
  misc_difference 3173: note = a, c, t, g, unknown or other
  misc_difference 3174: note = a, c, t, g, unknown or other
  misc_difference 3175: note = a, c, t, g, unknown or other
  misc_difference 3176: note = a, c, t, g, unknown or other
atacctcatcatataaagcggcgcacttccgaatggctgagttttccacgcccgtccgcagcgagatcgcgacggaggagcgatcgagcgtcccgagggcgggtgccggaggtgagtttacacaccgcagtcaaggggcaattcgggctcgggactggccgggctatggggcaagactcttaaaaaagccatgtttctcggtaaactttacagaaagaaaagggcactgtcactgctacgcgtgcgagctccagaggcgaaaccacctgctatgagttggagacccccggtgcacaaccccaatgggatcgagagaaacctgtgggaggcattctttcgcatgcatgcttcagcttgtggttgtggcgatcttgttggccatcttactgtactggctggtcggtatggtgctcctcctcgtcccccggcccccggcgctcccagaccaccgctgatacgccagctggcccttccggcgccccccgccgatcctcaacaggctaacccacaatggcctggtggggacggtggagaagatggcgctggaggccccgccgctggcggcgccgtcgcagacgccgagtaccaagaagacgagctcaacgccctgttcgacgccgtcgagcaagaagagtaaggaggaggcgatgggggaggcggaggtggagacgggggtacagacgcagactgagactaagacgcagacgcagacgaaagcgaaagatagtactaactcagtggaatcccgccaaagtgcggaggtgtactattaagggagttctgcccatgatcctgtgcggggccgggcgctcggggtttaactacggactgcacagcgacgactacactgtacagaagccccttggccagaacccccacgggggcggcatgagtacagtgacttttagcctacaggtgctctatgaccagtaccagaggtttatgaacaagtggtcgtactccaacgaccagctagacctcgccaggtactttggctgcaccttctggttctacagacacccagaggtggactttgtagctcagtttgacaacgttccccccatgaaaatggacgagaacacagccccaaacactcatccctctttcttactacagaacaaacacaaggttaaaattcccagctttaaaacaaagccttttggtaaaaaaagagttagagttacagtagggccccccaaactgtttgaagataagtggtacagccaacatgacttgtgtaaggtgcccctagtcagttggcggttaaccgcagctgacttcaggtttccgttctgctcaccacaaactgacaacccttgctacaccttccaggtattgcatgaagagtattacccagtaataggcacttctgctttagaaaacggcagtaactacaatagctcagctataacagccttagaaaaattcttatatgaaaaatgcacacactatcaaacatttgccacagacaccagacttaatcctcagcgaccagtgtcatctacaaatgcaaacaaaacatacaccccctcaggctcccaagaaacaatagtgtgggggcagtcagattttaatttatttaaaaagcacacagacagcaactatggctactgcacctactgtcctaccaatgacttagctacaaaaattaaaaagtacagagacaaaagattcgactggctaacaaacatgccagtaacaaacacctgccacataaatgccaccttcgcccgaggcaaaattaaagaatgggagtaccacctagggtggttctcaaacatctttataggcaacctgagacacaacctagcattccgggccgcatacatagacatcacctanacagacaagggagaaggcaacattatctggttccagtacctcactaaacccaccacagagtacatagaagcccaagcaaagtgctccatcacaaacatacccctgtatgctgctttttatggctacgaagactacctccagagaacactaggcccctaccaagatgtagaaaccctaggtataatctgtgttaaatgtccctacacagatccccctctagttcacaagtctacagataaaaagaactggggctacgtgttctacgacgtgcactttggcaacggaaagaccccagagggactgggccaggtgcacccttactggatgcagaggtggagaccctacgtacagtttcagaaagacactatgaacaaaatagccaggacgggaccgttcagctacagagacgagacgccttccatcaccctgaccgccgggtacaagtttcattttaactgggggggcgactctatatttccacagattattaaaaacccctgcccagacagcggggtacgaccttcatccagtagagagcgtcgctcagtacaagtcgttagcccgctcacaatggggccagagtacatattccaccggtgggactggcgacgggggttctttaatcaaaaagctctcaaaagaatgcttgaaaaatcaattaatgatggagagtatccaacaggcccaaaggtccctcgatggtttcccccactcgacaaccaagagcaagaaggcgcctcaggttcagaggagacaaggtcgcagtcctcgcaagaagaagccgctcaagaagccctccaagaagtccaagaggcgtcgctacagcagcacctcctccagcagtaccgagagcagcgacggatcggaaagcaactccaactcgtcatgctgcagctcaccaagacgcagagcaacctgcacataaacccccgtgttcttggccatgcataaataaagtctacatgtttccccccgacaagcccatgcccatacacgggtaccacgggtgggagacggagtaccaggcctgcaaggccttcaacaggccccccagaaactacctttcagacaaacccatctacccttggctccctcgccccgaacccgaaataatagtgagctttaggttcggtttcaaataaacaaggccgcaaataaacaaggccgtgggagtttcactggtcggtgtctacctcttaaggtcactaagcactccgagcgttagcgaggagtgcgacccttccccctggtgccacgccctcggcggccgcgcgctacgcctnnnnnnnnnnnnnnnnnnnnnnnnnnnnnnnnnnnnnnnnnnnnnnnnnnnntgaatcagtaacgaaagtgagtggggccagacttcgccataaggcctttatcttcttgccattggtccgtgtggggagtcgccataggcttcgggctcggttttaggccttccggactacaaaaaccgccattttagtgacgtcacggcggccattttaagtaagcatggcgggcggtgacgtacaagttgaaaggtcaccgcgcttccgtgtttactcaaaatggtggccaactgcttccgggtcaaaggtcggcggccacgtcataagtcacgtgggagggctgcgtcacaaacacggaagtggctgtcccacgtgacttgtcacgtgattgctacgtcacggccgccattttagttcacaaaatggcggacttc

SEQ ID NO: 863 - protein, 121 aa, Alphatorquevirus sp.
MSWRPPVHNPNGIERNLWEAFFRMHASACGCGDLVGHLTVLAGRYGAPPRPPAPGAPRPPLIRQLALPAPPADPQQANPQWPGGDGGEDGAGGPAAGGAVADAEYQEDELNALFDAVEQEE

SEQ ID NO: 864 - protein, 267 aa, Alphatorquevirus sp.
MSWRPPVHNPNGIERNLWEAFFRMHASACGCGDLVGHLTVLAGRYGAPPRPPAPGAPRPPLIRQLALPAPPADPQQANPQWPGGDGGEDGAGGPAAGGAVADAEYQEDELNALFDAVEQEELLKTPAQTAGYDLHPVESVAQYKSLARSQWGQSTYSTGGTGDGGSLIKKLSKECLKNQLMMESIQQAQRSLDGFPHSTTKSKKAPQVQRRQGRSPRKKKPLKKPSKKSKRRRYSSTSSSSTESSDGSESNSNSSCCSSPRRRATCT

SEQ ID NO: 865 - protein, 273 aa, Alphatorquevirus sp.
MSWRPPVHNPNGIERNLWEAFFRMHASACGCGDLVGHLTVLAGRYGAPPRPPAPGAPRPPLIRQLALPAPPADPQQANPQWPGGDGGEDGAGGPAAGGAVADAEYQEDELNALFDAVEQEEPKGPSMVSPTRQPRARRRLRFRGDKVAVLARRSRSRSPPRSPRGVATAAPPPAVPRAATDRKATPTRHAAAHQDAEQPAHKPPCSWPCINKVYMFPPDKPMPIHGYHGWETEYQACKAFNRPPRNYLSDKPIYPWLPRPEPEIIVSFRFGFK

SEQ ID NO: 866 - protein, 196 aa, Alphatorquevirus sp.
MSWRPPVHNPNGIERNLWEAFFRMHASACGCGDLVGHLTVLAGRPKGPSMVSPTRQPRARRRLRFRGDKVAVLARRSRSRSPPRSPRGVATAAPPPAVPRAATDRKATPTRHAAAHQDAEQPAHKPPCSWPCINKVYMFPPDKPMPIHGYHGWETEYQACKAFNRPPRNYLSDKPIYPWLPRPEPEIIVSFRFGFK

SEQ ID NO: 867 - protein, 760 aa, Alphatorquevirus sp.
  VARIANT 444: note = Any amino acid
MAWWGRWRRWRWRPRRWRRRRRRRVPRRRAQRPVRRRRARRVRRRRWGRRRWRRGYRRRLRLRRRRRRKRKIVLTQWNPAKVRRCTIKGVLPMILCGAGRSGFNYGLHSDDYTVQKPLGQNPHGGGMSTVTFSLQVLYDQYQRFMNKWSYSNDQLDLARYFGCTFWFYRHPEVDFVAQFDNVPPMKMDENTAPNTHPSFLLQNKHKVKIPSFKTKPFGKKRVRVTVGPPKLFEDKWYSQHDLCKVPLVSWRLTAADFRFPFCSPQTDNPCYTFQVLHEEYYPVIGTSALENGSNYNSSAITALEKFLYEKCTHYQTFATDTRLNPQRPVSSTNANKTYTPSGSQETIVWGQSDFNLFKKHTDSNYGYCTYCPTNDLATKIKKYRDKRFDWLTNMPVTNTCHINATFARGKIKEWEYHLGWFSNIFIGNLRHNLAFRAAYIDITXTDKGEGNIIWFQYLTKPTTEYIEAQAKCSITNIPLYAAFYGYEDYLQRTLGPYQDVETLGIICVKCPYTDPPLVHKSTDKKNWGYVFYDVHFGNGKTPEGLGQVHPYWMQRWRPYVQFQKDTMNKIARTGPFSYRDETPSITLTAGYKFHFNWGGDSIFPQIIKNPCPDSGVRPSSSRERRSVQVVSPLTMGPEYIFHRWDWRRGFFNQKALKRMLEKSINDGEYPTGPKVPRWFPPLDNQEQEGASGSEETRSQSSQEEAAQEALQEVQEASLQQHLLQQYREQRRIGKQLQLVMLQLTKTQSNLHINPRVLGHA

SEQ ID NO: 868 - protein, 196 aa, Alphatorquevirus sp.
MAWWGRWRRWRWRPRRWRRRRRRRVPRRRAQRPVRRRRARRIIKNPCPDSGVRPSSSRERRSVQVVSPLTMGPEYIFHRWDWRRGFFNQKALKRMLEKSINDGEYPTGPKVPRWFPPLDNQEQEGASGSEETRSQSSQEEAAQEALQEVQEASLQQHLLQQYREQRRIGKQLQLVMLQLTKTQSNLHINPRVLGHA

SEQ ID NO: 869 - protein, 121 aa, Alphatorquevirus sp.
MAWWGRWRRWRWRPRRWRRRRRRRVPRRRAQRPVRRRRARRAQRSLDGFPHSTTKSKKAPQVQRRQGRSPRKKKPLKKPSKKSKRRRYSSTSSSSTESSDGSESNSNSSCCSSPRRRATCT

SEQ ID NO: 870 - DNA, 3896 bp, Alphatorquevirus sp.
  source 1..3896: mol_type = genomic DNA
  misc_difference 1276: note = a, c, t, g, unknown or other
  misc_difference 3198: note = a, c, t, g, unknown or other
  misc_difference 3199: note = a, c, t, g, unknown or other
  misc_difference 3200: note = a, c, t, g, unknown or other
  misc_difference 3201: note = a, c, t, g, unknown or other
  misc_difference 3202: note = a, c, t, g, unknown or other
  misc_difference 3203: note = a, c, t, g, unknown or other
  misc_difference 3204: note = a, c, t, g, unknown or other
  misc_difference 3205: note = a, c, t, g, unknown or other
  misc_difference 3206: note = a, c, t, g, unknown or other
  misc_difference 3207: note = a, c, t, g, unknown or other
  misc_difference 3208: note = a, c, t, g, unknown or other
  misc_difference 3209: note = a, c, t, g, unknown or other
  misc_difference 3210: note = a, c, t, g, unknown or other
  misc_difference 3211: note = a, c, t, g, unknown or other
  misc_difference 3212: note = a, c, t, g, unknown or other
  misc_difference 3213: note = a, c, t, g, unknown or other
  misc_difference 3214: note = a, c, t, g, unknown or other
  misc_difference 3215: note = a, c, t, g, unknown or other
  misc_difference 3216: note = a, c, t, g, unknown or other
  misc_difference 3217: note = a, c, t, g, unknown or other
  misc_difference 3218: note = a, c, t, g, unknown or other
  misc_difference 3219: note = a, c, t, g, unknown or other
  misc_difference 3220: note = a, c, t, g, unknown or other
  misc_difference 3221: note = a, c, t, g, unknown or other
  misc_difference 3222: note = a, c, t, g, unknown or other
  misc_difference 3223: note = a, c, t, g, unknown or other
  misc_difference 3224: note = a, c, t, g, unknown or other
  misc_difference 3225: note = a, c, t, g, unknown or other
  misc_difference 3226: note = a, c, t, g, unknown or other
  misc_difference 3227: note = a, c, t, g, unknown or other
  misc_difference 3228: note = a, c, t, g, unknown or other
  misc_difference 3229: note = a, c, t, g, unknown or other
  misc_difference 3230: note = a, c, t, g, unknown or other
  misc_difference 3231: note = a, c, t, g, unknown or other
  misc_difference 3232: note = a, c, t, g, unknown or other
  misc_difference 3233: note = a, c, t, g, unknown or other
  misc_difference 3234: note = a, c, t, g, unknown or other
  misc_difference 3235: note = a, c, t, g, unknown or other
  misc_difference 3236: note = a, c, t, g, unknown or other
  misc_difference 3237: note = a, c, t, g, unknown or other
  misc_difference 3238: note = a, c, t, g, unknown or other
  misc_difference 3239: note = a, c, t, g, unknown or other
  misc_difference 3240: note = a, c, t, g, unknown or other
  misc_difference 3241: note = a, c, t, g, unknown or other
  misc_difference 3242: note = a, c, t, g, unknown or other
  misc_difference 3243: note = a, c, t, g, unknown or other
  misc_difference 3244: note = a, c, t, g, unknown or other
  misc_difference 3245: note = a, c, t, g, unknown or other
  misc_difference 3246: note = a, c, t, g, unknown or other
  misc_difference 3247: note = a, c, t, g, unknown or other
  misc_difference 3248: note = a, c, t, g, unknown or other
  misc_difference 3249: note = a, c, t, g, unknown or other
  misc_difference 3250: note = a, c, t, g, unknown or other
  misc_difference 3251: note = a, c, t, g, unknown or other
  misc_difference 3252: note = a, c, t, g, unknown or other
  misc_difference 3253: note = a, c, t, g, unknown or other
  misc_difference 3254: note = a, c, t, g, unknown or other
  misc_difference 3255: note = a, c, t, g, unknown or other
  misc_difference 3256: note = a, c, t, g, unknown or other
  misc_difference 3257: note = a, c, t, g, unknown or other
  misc_difference 3258: note = a, c, t, g, unknown or other
  misc_difference 3259: note = a, c, t, g, unknown or other
  misc_difference 3260: note = a, c, t, g, unknown or other
  misc_difference 3261: note = a, c, t, g, unknown or other
  misc_difference 3262: note = a, c, t, g, unknown or other
  misc_difference 3263: note = a, c, t, g, unknown or other
  misc_difference 3264: note = a, c, t, g, unknown or other
  misc_difference 3265: note = a, c, t, g, unknown or other
  misc_difference 3266: note = a, c, t, g, unknown or other
  misc_difference 3267: note = a, c, t, g, unknown or other
  misc_difference 3268: note = a, c, t, g, unknown or other
  misc_difference 3269: note = a, c, t, g, unknown or other
  misc_difference 3270: note = a, c, t, g, unknown or other
  misc_difference 3271: note = a, c, t, g, unknown or other
  misc_difference 3272: note = a, c, t, g, unknown or other
  misc_difference 3273: note = a, c, t, g, unknown or other
  misc_difference 3274: note = a, c, t, g, unknown or other
  misc_difference 3275: note = a, c, t, g, unknown or other
  misc_difference 3276: note = a, c, t, g, unknown or other
  misc_difference 3277: note = a, c, t, g, unknown or other
  misc_difference 3278: note = a, c, t, g, unknown or other
  misc_difference 3279: note = a, c, t, g, unknown or other
  misc_difference 3280: note = a, c, t, g, unknown or other
  misc_difference 3281: note = a, c, t, g, unknown or other
  misc_difference 3282: note = a, c, t, g, unknown or other
  misc_difference 3283: note = a, c, t, g, unknown or other
  misc_difference 3284: note = a, c, t, g, unknown or other
  misc_difference 3285: note = a, c, t, g, unknown or other
  misc_difference 3286: note = a, c, t, g, unknown or other
  misc_difference 3287: note = a, c, t, g, unknown or other
  misc_difference 3288: note = a, c, t, g, unknown or other
  misc_difference 3289: note = a, c, t, g, unknown or other
  misc_difference 3290: note = a, c, t, g, unknown or other
  misc_difference 3291: note = a, c, t, g, unknown or other
  misc_difference 3292: note = a, c, t, g, unknown or other
  misc_difference 3293: note = a, c, t, g, unknown or other
  misc_difference 3294: note = a, c, t, g, unknown or other
  misc_difference 3295: note = a, c, t, g, unknown or other
  misc_difference 3296: note = a, c, t, g, unknown or other
  misc_difference 3297: note = a, c, t, g, unknown or other
  misc_difference 3298: note = a, c, t, g, unknown or other
  misc_difference 3299: note = a, c, t, g, unknown or other
  misc_difference 3300: note = a, c, t, g, unknown or other
  misc_difference 3301: note = a, c, t, g, unknown or other
  misc_difference 3302: note = a, c, t, g, unknown or other
  misc_difference 3303: note = a, c, t, g, unknown or other
  misc_difference 3304: note = a, c, t, g, unknown or other
  misc_difference 3305: note = a, c, t, g, unknown or other
  misc_difference 3306: note = a, c, t, g, unknown or other
  misc_difference 3307: note = a, c, t, g, unknown or other
  misc_difference 3308: note = a, c, t, g, unknown or other
  misc_difference 3309: note = a, c, t, g, unknown or other
  misc_difference 3310: note = a, c, t, g, unknown or other
  misc_difference 3311: note = a, c, t, g, unknown or other
  misc_difference 3312: note = a, c, t, g, unknown or other
  misc_difference 3313: note = a, c, t, g, unknown or other
  misc_difference 3314: note = a, c, t, g, unknown or other
  misc_difference 3315: note = a, c, t, g, unknown or other
  misc_difference 3316: note = a, c, t, g, unknown or other
  misc_difference 3317: note = a, c, t, g, unknown or other
  misc_difference 3318: note = a, c, t, g, unknown or other
  misc_difference 3319: note = a, c, t, g, unknown or other
  misc_difference 3320: note = a, c, t, g, unknown or other
  misc_difference 3321: note = a, c, t, g, unknown or other
  misc_difference 3322: note = a, c, t, g, unknown or other
  misc_difference 3323: note = a, c, t, g, unknown or other
  misc_difference 3324: note = a, c, t, g, unknown or other
  misc_difference 3325: note = a, c, t, g, unknown or other
  misc_difference 3326: note = a, c, t, g, unknown or other
  misc_difference 3327: note = a, c, t, g, unknown or other
  misc_difference 3328: note = a, c, t, g, unknown or other
  misc_difference 3329: note = a, c, t, g, unknown or other
  misc_difference 3330: note = a, c, t, g, unknown or other
  misc_difference 3331: note = a, c, t, g, unknown or other
  misc_difference 3332: note = a, c, t, g, unknown or other
  misc_difference 3333: note = a, c, t, g, unknown or other
  misc_difference 3334: note = a, c, t, g, unknown or other
  misc_difference 3335: note = a, c, t, g, unknown or other
  misc_difference 3336: note = a, c, t, g, unknown or other
  misc_difference 3337: note = a, c, t, g, unknown or other
  misc_difference 3338: note = a, c, t, g, unknown or other
  misc_difference 3339: note = a, c, t, g, unknown or other
  misc_difference 3340: note = a, c, t, g, unknown or other
  misc_difference 3341: note = a, c, t, g, unknown or other
  misc_difference 3342: note = a, c, t, g, unknown or other
  misc_difference 3343: note = a, c, t, g, unknown or other
  misc_difference 3344: note = a, c, t, g, unknown or other
  misc_difference 3345: note = a, c, t, g, unknown or other
  misc_difference 3346: note = a, c, t, g, unknown or other
  misc_difference 3347: note = a, c, t, g, unknown or other
  misc_difference 3348: note = a, c, t, g, unknown or other
  misc_difference 3349: note = a, c, t, g, unknown or other
  misc_difference 3350: note = a, c, t, g, unknown or other
  misc_difference 3351: note = a, c, t, g, unknown or other
  misc_difference 3352: note = a, c, t, g, unknown or other
  misc_difference 3353: note = a, c, t, g, unknown or other
  misc_difference 3354: note = a, c, t, g, unknown or other
  misc_difference 3355: note = a, c, t, g, unknown or other
  misc_difference 3356: note = a, c, t, g, unknown or other
  misc_difference 3357: note = a, c, t, g, unknown or other
  misc_difference 3358: note = a, c, t, g, unknown or other
  misc_difference 3359: note = a, c, t, g, unknown or other
  misc_difference 3360: note = a, c, t, g, unknown or other
  misc_difference 3361: note = a, c, t, g, unknown or other
  misc_difference 3362: note = a, c, t, g, unknown or other
  misc_difference 3363: note = a, c, t, g, unknown or other
  misc_difference 3364: note = a, c, t, g, unknown or other
  misc_difference 3365: note = a, c, t, g, unknown or other
  misc_difference 3366: note = a, c, t, g, unknown or other
  misc_difference 3367: note = a, c, t, g, unknown or other
  misc_difference 3368: note = a, c, t, g, unknown or other
  misc_difference 3369: note = a, c, t, g, unknown or other
  misc_difference 3370: note = a, c, t, g, unknown or other
  misc_difference 3371: note = a, c, t, g, unknown or other
  misc_difference 3372: note = a, c, t, g, unknown or other
  misc_difference 3373: note = a, c, t, g, unknown or other
  misc_difference 3374: note = a, c, t, g, unknown or other
  misc_difference 3375: note = a, c, t, g, unknown or other
  misc_difference 3376: note = a, c, t, g, unknown or other
  misc_difference 3377: note = a, c, t, g, unknown or other
  misc_difference 3378: note = a, c, t, g, unknown or other
  misc_difference 3379: note = a, c, t, g, unknown or other
  misc_difference 3380: note = a, c, t, g, unknown or other
  misc_difference 3381: note = a, c, t, g, unknown or other
  misc_difference 3382: note = a, c, t, g, unknown or other
  misc_difference 3383: note = a, c, t, g, unknown or other
  misc_difference 3384: note = a, c, t, g, unknown or other
  misc_difference 3385: note = a, c, t, g, unknown or other
  misc_difference 3386: note = a, c, t, g, unknown or other
  misc_difference 3387: note = a, c, t, g, unknown or other
  misc_difference 3388: note = a, c, t, g, unknown or other
  misc_difference 3389: note = a, c, t, g, unknown or other
  misc_difference 3390: note = a, c, t, g, unknown or other
  misc_difference 3391: note = a, c, t, g, unknown or other
  misc_difference 3392: note = a, c, t, g, unknown or other
  misc_difference 3393: note = a, c, t, g, unknown or other
  misc_difference 3394: note = a, c, t, g, unknown or other
  misc_difference 3395: note = a, c, t, g, unknown or other
  misc_difference 3396: note = a, c, t, g, unknown or other
  misc_difference 3397: note = a, c, t, g, unknown or other
  misc_difference 3398: note = a, c, t, g, unknown or other
  misc_difference 3399: note = a, c, t, g, unknown or other
  misc_difference 3400: note = a, c, t, g, unknown or other
  misc_difference 3401: note = a, c, t, g, unknown or other
  misc_difference 3402: note = a, c, t, g, unknown or other
  misc_difference 3403: note = a, c, t, g, unknown or other
  misc_difference 3404: note = a, c, t, g, unknown or other
  misc_difference 3405: note = a, c, t, g, unknown or other
  misc_difference 3406: note = a, c, t, g, unknown or other
  misc_difference 3407: note = a, c, t, g, unknown or other
  misc_difference 3408: note = a, c, t, g, unknown or other
  misc_difference 3409: note = a, c, t, g, unknown or other
  misc_difference 3410: note = a, c, t, g, unknown or other
  misc_difference 3411: note = a, c, t, g, unknown or other
  misc_difference 3412: note = a, c, t, g, unknown or other
  misc_difference 3413: note = a, c, t, g, unknown or other
  misc_difference 3414: note = a, c, t, g, unknown or other
  misc_difference 3415: note = a, c, t, g, unknown or other
  misc_difference 3416: note = a, c, t, g, unknown or other
  misc_difference 3417: note = a, c, t, g, unknown or other
  misc_difference 3418: note = a, c, t, g, unknown or other
  misc_difference 3419: note = a, c, t, g, unknown or other
  misc_difference 3420: note = a, c, t, g, unknown or other
  misc_difference 3421: note = a, c, t, g, unknown or other
  misc_difference 3422: note = a, c, t, g, unknown or other
  misc_difference 3423: note = a, c, t, g, unknown or other
  misc_difference 3424: note = a, c, t, g, unknown or other
  misc_difference 3425: note = a, c, t, g, unknown or other
  misc_difference 3426: note = a, c, t, g, unknown or other
  misc_difference 3427: note = a, c, t, g, unknown or other
  misc_difference 3428: note = a, c, t, g, unknown or other
  misc_difference 3429: note = a, c, t, g, unknown or other
  misc_difference 3430: note = a, c, t, g, unknown or other
  misc_difference 3431: note = a, c, t, g, unknown or other
  misc_difference 3432: note = a, c, t, g, unknown or other
  misc_difference 3433: note = a, c, t, g, unknown or other
  misc_difference 3434: note = a, c, t, g, unknown or other
  misc_difference 3435: note = a, c, t, g, unknown or other
  misc_difference 3436: note = a, c, t, g, unknown or other
  misc_difference 3437: note = a, c, t, g, unknown or other
  misc_difference 3438: note = a, c, t, g, unknown or other
  misc_difference 3439: note = a, c, t, g, unknown or other
  misc_difference 3440: note = a, c, t, g, unknown or other
  misc_difference 3441: note = a, c, t, g, unknown or other
  misc_difference 3442: note = a, c, t, g, unknown or other
  misc_difference 3443: note = a, c, t, g, unknown or other
  misc_difference 3444: note = a, c, t, g, unknown or other
  misc_difference 3445: note = a, c, t, g, unknown or other
  misc_difference 3446: note = a, c, t, g, unknown or other
  misc_difference 3447: note = a, c, t, g, unknown or other
  misc_difference 3448: note = a, c, t, g, unknown or other
  misc_difference 3449: note = a, c, t, g, unknown or other
  misc_difference 3450: note = a, c, t, g, unknown or other
  misc_difference 3451: note = a, c, t, g, unknown or other
  misc_difference 3452: note = a, c, t, g, unknown or other
  misc_difference 3453: note = a, c, t, g, unknown or other
  misc_difference 3454: note = a, c, t, g, unknown or other
  misc_difference 3455: note = a, c, t, g, unknown or other
  misc_difference 3456: note = a, c, t, g, unknown or other
  misc_difference 3457: note = a, c, t, g, unknown or other
  misc_difference 3458: note = a, c, t, g, unknown or other
  misc_difference 3459: note = a, c, t, g, unknown or other
  misc_difference 3460: note = a, c, t, g, unknown or other
  misc_difference 3461: note = a, c, t, g, unknown or other
  misc_difference 3462: note = a, c, t, g, unknown or other
  misc_difference 3463: note = a, c, t, g, unknown or other
  misc_difference 3464: note = a, c, t, g, unknown or other
  misc_difference 3465: note = a, c, t, g, unknown or other
  misc_difference 3466: note = a, c, t, g, unknown or other
  misc_difference 3467: note = a, c, t, g, unknown or other
  misc_difference 3468: note = a, c, t, g, unknown or other
  misc_difference 3469: note = a, c, t, g, unknown or other
  misc_difference 3470: note = a, c, t, g, unknown or other
  misc_difference 3471: note = a, c, t, g, unknown or other
  misc_difference 3472: note = a, c, t, g, unknown or other
  misc_difference 3473: note = a, c, t, g, unknown or other
  misc_difference 3474: note = a, c, t, g, unknown or other
  misc_difference 3475: note = a, c, t, g, unknown or other
  misc_difference 3476: note = a, c, t, g, unknown or other
  misc_difference 3477: note = a, c, t, g, unknown or other
  misc_difference 3478: note = a, c, t, g, unknown or other
  misc_difference 3479: note = a, c, t, g, unknown or other
  misc_difference 3480: note = a, c, t, g, unknown or other
  misc_difference 3481: note = a, c, t, g, unknown or other
  misc_difference 3482: note = a, c, t, g, unknown or other
  misc_difference 3483: note = a, c, t, g, unknown or other
  misc_difference 3484: note = a, c, t, g, unknown or other
  misc_difference 3485: note = a, c, t, g, unknown or other
  misc_difference 3486: note = a, c, t, g, unknown or other
  misc_difference 3487: note = a, c, t, g, unknown or other
  misc_difference 3488: note = a, c, t, g, unknown or other
  misc_difference 3489: note = a, c, t, g, unknown or other
  misc_difference 3490: note = a, c, t, g, unknown or other
  misc_difference 3491: note = a, c, t, g, unknown or other
  misc_difference 3492: note = a, c, t, g, unknown or other
  misc_difference 3493: note = a, c, t, g, unknown or other
  misc_difference 3494: note = a, c, t, g, unknown or other
  misc_difference 3495: note = a, c, t, g, unknown or other
  misc_difference 3496: note = a, c, t, g, unknown or other
  misc_difference 3497: note = a, c, t, g, unknown or other
  misc_difference 3498: note = a, c, t, g, unknown or other
  misc_difference 3499: note = a, c, t, g, unknown or other
  misc_difference 3500: note = a, c, t, g, unknown or other
  misc_difference 3501: note = a, c, t, g, unknown or other
  misc_difference 3502: note = a, c, t, g, unknown or other
  misc_difference 3503: note = a, c, t, g, unknown or other
  misc_difference 3504: note = a, c, t, g, unknown or other
  misc_difference 3505: note = a, c, t, g, unknown or other
  misc_difference 3506: note = a, c, t, g, unknown or other
  misc_difference 3507: note = a, c, t, g, unknown or other
  misc_difference 3508: note = a, c, t, g, unknown or other
  misc_difference 3509: note = a, c, t, g, unknown or other
  misc_difference 3510: note = a, c, t, g, unknown or other
  misc_difference 3511: note = a, c, t, g, unknown or other
  misc_difference 3512: note = a, c, t, g, unknown or other
  misc_difference 3513: note = a, c, t, g, unknown or other
  misc_difference 3514: note = a, c, t, g, unknown or other
  misc_difference 3515: note = a, c, t, g, unknown or other
  misc_difference 3516: note = a, c, t, g, unknown or other
  misc_difference 3517: note = a, c, t, g, unknown or other
  misc_difference 3518: note = a, c, t, g, unknown or other
  misc_difference 3519: note = a, c, t, g, unknown or other
  misc_difference 3520: note = a, c, t, g, unknown or other
  misc_difference 3521: note = a, c, t, g, unknown or other
  misc_difference 3522: note = a, c, t, g, unknown or other
  misc_difference 3523: note = a, c, t, g, unknown or other
  misc_difference 3524: note = a, c, t, g, unknown or other
  misc_difference 3525: note = a, c, t, g, unknown or other
  misc_difference 3526: note = a, c, t, g, unknown or other
  misc_difference 3527: note = a, c, t, g, unknown or other
  misc_difference 3528: note = a, c, t, g, unknown or other
  misc_difference 3529: note = a, c, t, g, unknown or other
  misc_difference 3530: note = a, c, t, g, unknown or other
  misc_difference 3531: note = a, c, t, g, unknown or other
  misc_difference 3532: note = a, c, t, g, unknown or other
  misc_difference 3533: note = a, c, t, g, unknown or other
  misc_difference 3534: note = a, c, t, g, unknown or other
  misc_difference 3535: note = a, c, t, g, unknown or other
  misc_difference 3536: note = a, c, t, g, unknown or other
  misc_difference 3537: note = a, c, t, g, unknown or other
  misc_difference 3538: note = a, c, t, g, unknown or other
  misc_difference 3539: note = a, c, t, g, unknown or other
  misc_difference 3540: note = a, c, t, g, unknown or other
  misc_difference 3541: note = a, c, t, g, unknown or other
  misc_difference 3542: note = a, c, t, g, unknown or other
  misc_difference 3543: note = a, c, t, g, unknown or other
  misc_difference 3544: note = a, c, t, g, unknown or other
  misc_difference 3545: note = a, c, t, g, unknown or other
  misc_difference 3546: note = a, c, t, g, unknown or other
  misc_difference 3547: note = a, c, t, g, unknown or other
  misc_difference 3548: note = a, c, t, g, unknown or other
  misc_difference 3549: note = a, c, t, g, unknown or other
  misc_difference 3550: note = a, c, t, g, unknown or other
  misc_difference 3551: note = a, c, t, g, unknown or other
  misc_difference 3552: note = a, c, t, g, unknown or other
  misc_difference 3553: note = a, c, t, g, unknown or other
  misc_difference 3554: note = a, c, t, g, unknown or other
  misc_difference 3555: note = a, c, t, g, unknown or other
  misc_difference 3556: note = a, c, t, g, unknown or other
  misc_difference 3557: note = a, c, t, g, unknown or other
  misc_difference 3558: note = a, c, t, g, unknown or other
  misc_difference 3559: note = a, c, t, g, unknown or other
  misc_difference 3560: note = a, c, t, g, unknown or other
  misc_difference 3561: note = a, c, t, g, unknown or other
  misc_difference 3562: note = a, c, t, g, unknown or other
  misc_difference 3563: note = a, c, t, g, unknown or other
  misc_difference 3564: note = a, c, t, g, unknown or other
  misc_difference 3565: note = a, c, t, g, unknown or other
  misc_difference 3566: note = a, c, t, g, unknown or other
  misc_difference 3567: note = a, c, t, g, unknown or other
  misc_difference 3568: note = a, c, t, g, unknown or other
  misc_difference 3569: note = a, c, t, g, unknown or other
  misc_difference 3570: note = a, c, t, g, unknown or other
  misc_difference 3571: note = a, c, t, g, unknown or other
  misc_difference 3572: note = a, c, t, g, unknown or other
  misc_difference 3573: note = a, c, t, g, unknown or other
  misc_difference 3574: note = a, c, t, g, unknown or other
  misc_difference 3575: note = a, c, t, g, unknown or other
  misc_difference 3576: note = a, c, t, g, unknown or other
  misc_difference 3577: note = a, c, t, g, unknown or other
  misc_difference 3578: note = a, c, t, g, unknown or other
  misc_difference 3579: note = a, c, t, g, unknown or other
  misc_difference 3580: note = a, c, t, g, unknown or other
  misc_difference 3581: note = a, c, t, g, unknown or other
  misc_difference 3582: note = a, c, t, g, unknown or other
  misc_difference 3583: note = a, c, t, g, unknown or other
  misc_difference 3584: note = a, c, t, g, unknown or other
  misc_difference 3585: note = a, c, t, g, unknown or other
  misc_difference 3586: note = a, c, t, g, unknown or other
  misc_difference 3587: note = a, c, t, g, unknown or other
  misc_difference 3588: note = a, c, t, g, unknown or other
  misc_difference 3589: note = a, c, t, g, unknown or other
  misc_difference 3590: note = a, c, t, g, unknown or other
  misc_difference 3591: note = a, c, t, g, unknown or other
  misc_difference 3592: note = a, c, t, g, unknown or other
  misc_difference 3593: note = a, c, t, g, unknown or other
  misc_difference 3594: note = a, c, t, g, unknown or other
  misc_difference 3595: note = a, c, t, g, unknown or other
  misc_difference 3596: note = a, c, t, g, unknown or other
  misc_difference 3597: note = a, c, t, g, unknown or other
  misc_difference 3598: note = a, c, t, g, unknown or other
  misc_difference 3599: note = a, c, t, g, unknown or other
  misc_difference 3600: note = a, c, t, g, unknown or other
  misc_difference 3601: note = a, c, t, g, unknown or other
  misc_difference 3602: note = a, c, t, g, unknown or other
  misc_difference 3603: note = a, c, t, g, unknown or other
  misc_difference 3604: note = a, c, t, g, unknown or other
  misc_difference 3605: note = a, c, t, g, unknown or other
  misc_difference 3606: note = a, c, t, g, unknown or other
  misc_difference 3607: note = a, c, t, g, unknown or other
  misc_difference 3608: note = a, c, t, g, unknown or other
  misc_difference 3609: note = a, c, t, g, unknown or other
  misc_difference 3610: note = a, c, t, g, unknown or other
  misc_difference 3611: note = a, c, t, g, unknown or other
  misc_difference 3612: note = a, c, t, g, unknown or other
  misc_difference 3613: note = a, c, t, g, unknown or other
  misc_difference 3614: note = a, c, t, g, unknown or other
  misc_difference 3615: note = a, c, t, g, unknown or other
  misc_difference 3616: note = a, c, t, g, unknown or other
  misc_difference 3617: note = a, c, t, g, unknown or other
  misc_difference 3618: note = a, c, t, g, unknown or other
  misc_difference 3619: note = a, c, t, g, unknown or other
  misc_difference 3620: note = a, c, t, g, unknown or other
  misc_difference 3621: note = a, c, t, g, unknown or other
  misc_difference 3622: note = a, c, t, g, unknown or other
  misc_difference 3623: note = a, c, t, g, unknown or other
  misc_difference 3624: note = a, c, t, g, unknown or other
  misc_difference 3625: note = a, c, t, g, unknown or other
  misc_difference 3626: note = a, c, t, g, unknown or other
  misc_difference 3627: note = a, c, t, g, unknown or other
  misc_difference 3628: note = a, c, t, g, unknown or other
  misc_difference 3629: note = a, c, t, g, unknown or other
  misc_difference 3630: note = a, c, t, g, unknown or other
  misc_difference 3631: note = a, c, t, g, unknown or other
  misc_difference 3632: note = a, c, t, g, unknown or other
  misc_difference 3633: note = a, c, t, g, unknown or other
  misc_difference 3634: note = a, c, t, g, unknown or other
  misc_difference 3635: note = a, c, t, g, unknown or other
  misc_difference 3636: note = a, c, t, g, unknown or other
  misc_difference 3637: note = a, c, t, g, unknown or other
  misc_difference 3638: note = a, c, t, g, unknown or other
  misc_difference 3639: note = a, c, t, g, unknown or other
  misc_difference 3640: note = a, c, t, g, unknown or other
  misc_difference 3641: note = a, c, t, g, unknown or other
  misc_difference 3642: note = a, c, t, g, unknown or other
  misc_difference 3643: note = a, c, t, g, unknown or other
  misc_difference 3644: note = a, c, t, g, unknown or other
  misc_difference 3645: note = a, c, t, g, unknown or other
  misc_difference 3646: note = a, c, t, g, unknown or other
  misc_difference 3647: note = a, c, t, g, unknown or other
  misc_difference 3648: note = a, c, t, g, unknown or other
  misc_difference 3649: note = a, c, t, g, unknown or other
  misc_difference 3650: note = a, c, t, g, unknown or other
  misc_difference 3651: note = a, c, t, g, unknown or other
  misc_difference 3652: note = a, c, t, g, unknown or other
  misc_difference 3653: note = a, c, t, g, unknown or other
  misc_difference 3654: note = a, c, t, g, unknown or other
  misc_difference 3655: note = a, c, t, g, unknown or other
taaacttcctcttttaataggaaaccacaaaatttgcattgccgaccacaaacgcatatgcaaatttacttccccaaaaactcaaccacaaaatttgcattgccgcccacaaacgtctactttaaccacatcctctaacatgttagaaactccacccaactacttcattagtatacagcatcacaagggaggagccaaacaactatataaccaagtgtacttccgaatggctgagtttatgccgccagacggagacgggatcgcgacggaggagcgatcgagcgtcccgagggcgggtgccggaggtgagtttacacaccgcagtcaaggggcaattcgggctcgggactggccgggctatgggcaaggctcttaaaaaagccatgtttctcggtcgaccttacagaaagaaaagggcactgtcactgctacgcgtgcgagctccagaggcgaaaccacctgctatgagctggaggcccccggtgcacaaccctaatgggatccagagaaacctgtgggaggcattctttcgcatgcatgctgcagcttgtggttgtggcgatcttgttggccatattactgtactggctggtcggtatggtgctcctcctcgtcccccggcccccggggctcccagaccaccgctgatacgccagctggcccttccggcgccccccgccgatcctcaacaggctaacccacaatggcctggtggggacggtggagaagatggcgctggaggccccgccgctggcggcgccgtcgcagacgccgagtaccaagaagacgagctcaacgccctgttcgacgccgtcgagcaagaagagtaaggaggaggcgatgggggaggcggaggtggagacgggggtacagacgcagactaagactgagacgcagacgcagacgaaagaaaataagactgactcagtggaacccagccaaagtcaggagatgtactattaagggggtgctacccatgatcttatgcggcgccggccgctcggggtttaactatggactgcacagcgacgactacacggtgcagaaacccctggggcagaacccccacgggggcggcatgagcacagtaacttttagcctacaagtactatttgaccagtaccagaggtttatgaaccggtggtcgtactccaacgaccagctagacctcgccaggtactttggctgcaccttctacttttacagacaccctgaaattgactttgtagctcagtatgacaatgtacccccaatgaaaatggacgagaacacggcncctaacactcacccctcttttctactacaaaacaaacgcaaaattaaaatccccagctttaaaaccaagccatttggcagaaaaagagtaaaagtaacagtggggccccccaaactgtttgaagataaatggtacagccagcatgacttgtgtaaggtgcccctagtcagttggcggttaaccgcatgtgacttcaggtttccgttctgctcaccactaactgacaacccttgctacaccttccaggtattgcatgaaaactattacccagtcataggcacttcctctttagaaaacggtacaaactacaataacactgctataactacccttgagacatggctatatggaaaatgcacacactatcaaacatttgccacagacaccagacttaatccacagagacctgtatcttcaagtaatgcaaatgaaacttatactcctagtggttctaaagaatcaataatatggggacagtctgactgggcaaactttaaaaagaacacagacagcaactatggctactgttcctactgcccctcaaatggcactaacggaacagtagataaaattaaaaaatacagagaccaaagatttagatggcttacagaaatgccagtacctaacacctgtcacatacatgccaccttcgcccgaggcactattaaatactgggagtaccacctaggctggtactcaaacatatttattggcaacctcagacacaacttagccttcagaccagcctacatagacattacctacaatcccatcactgacaaaggagagggcaacattatctggttccagtacctcactaagcccaccacagaatacatagaaacccaggcaaaatgcaccattactaacattcccctttatgctgctttctatggctacgaagactacctccagagaacactaggcccctaccaagatgtagaaaccctaggcataatctgtgttaaatgtccctacacagatccccctctagttcacaaagacaaaagtaaaaccaactggggctacgtattctacgacgcccactttggcaacggaaagaccccagagggactaggccaagtacacccttactggatgcagagatggagaccctatgtacagtttcaaaaagacaccatgcacaaaatatccagaacgggacccttcagctacagagacgacacgccttccatcaccctcactgccgaatacaagtttcgttttaactgggggggcgactctatatttccacagattattaaaaacccctgcccagacaccggggttcgaccttcaaccggtagagaccgtcgctcagtacaagtcgttagcccgctcacaatgggaccccagtttatattccactcatgggactggagacgggggttctttaatcaaaaaactctcaaaagaatgcttgaaaaaccagttaatgatggagaatatccaacaggcccaaaggtgcctcgatggtttcccccactcgacaaccaagagcaagaaggcgtctcagatacagagacgacaacctcgcagtcctcgcaagaagaagccgctcaagaagccctccaagaagtccaagaggcgtcgctacagcagcacctcctccagcagtaccgagagcagcgaagaatcggaaagcaactccaactcgtcatgctccaactcaccaagacgcagagcaacctgcacataaatccccgtgtccttggccatgcataaataaagtgtacatgtttccccccgaaaagccaatgcccatacacggctaccacgggtgggagacagagtatcaggcctgcaaggcctttgacaggccccctagaaactacctatcagacaaacccatctacccctggcttccccgctcccaaccagaatttaaagtgagttttaagcttggctgtcaataaacaagnnnnnnnnnnnnnnnnnnnnnnnnnnnnnnnnnnnnnnnnnnnnnnnnnnnnnnnnnnnnnnnnnnnnnnnnnnnnnnnnnnnnnnnnnnnnnnnnnnnnnnnnnnnnnnnnnnnnnnnnnnnnnnnnnnnnnnnnnnnnnnnnnnnnnnnnnnnnnnnnnnnnnnnnnnnnnnnnnnnnnnnnnnnnnnnnnnnnnnnnnnnnnnnnnnnnnnnnnnnnnnnnnnnnnnnnnnnnnnnnnnnnnnnnnnnnnnnnnnnnnnnnnnnnnnnnnnnnnnnnnnnnnnnnnnnnnnnnnnnnnnnnnnnnnnnnnnnnnnnnnnnnnnnnnnnnnnnnnnnnnnnnnnnnnnnnnnnnnnnnnnnnnnnnnnnnnnnnnnnnnnnnnnnnnnnnnnnnnnnnnnnnnnnnnnnnnnnnnnnnnnnnnnnnnnnnnnnnnnnnnnnnnnnnnnnnnnnnnngtttacacaaaatggtggccaagtccttccgggtgaaaggtcggcgcctacgtcataagtcacgtggggagggctgcgtcacaaccaggaagcaatcctcaccacgtgatttgtcacgtgatcgctacgtcacggccgccattttagtttacaaaatggcggacttccttcctctttttcaaaaataacggccctgcggcggcgcgcgcgctgcgcgcgcgcgccgggggctgccgcccca

SEQ ID NO: 871 - protein, 121 aa, Alphatorquevirus sp.
MSWRPPVHNPNGIQRNLWEAFFRMHAAACGCGDLVGHITVLAGRYGAPPRPPAPGAPRPPLIRQLALPAPPADPQQANPQWPGGDGGEDGAGGPAAGGAVADAEYQEDELNALFDAVEQEE

SEQ ID NO: 872 - protein, 267 aa, Alphatorquevirus sp.
MSWRPPVHNPNGIQRNLWEAFFRMHAAACGCGDLVGHITVLAGRYGAPPRPPAPGAPRPPLIRQLALPAPPADPQQANPQWPGGDGGEDGAGGPAAGGAVADAEYQEDELNALFDAVEQEELLKTPAQTPGFDLQPVETVAQYKSLARSQWDPSLYSTHGTGDGGSLIKKLSKECLKNQLMMENIQQAQRCLDGFPHSTTKSKKASQIQRRQPRSPRKKKPLKKPSKKSKRRRYSSTSSSSTESSEESESNSNSSCSNSPRRRATCT

SEQ ID NO: 873 - protein, 277 aa, Alphatorquevirus sp.
MSWRPPVHNPNGIQRNLWEAFFRMHAAACGCGDLVGHITVLAGRYGAPPRPPAPGAPRPPLIRQLALPAPPADPQQANPQWPGGDGGEDGAGGPAAGGAVADAEYQEDELNALFDAVEQEEISNRPKGASMVSPTRQPRARRRLRYRDDNLAVLARRSRSRSPPRSPRGVATAAPPPAVPRAAKNRKATPTRHAPTHQDAEQPAHKSPCPWPCINKVYMFPPEKPMPIHGYHGWETEYQACKAFDRPPRNYLSDKPIYPWLPRSQPEFKVSFKLGCQ

SEQ ID NO: 874 - protein, 200 aa, Alphatorquevirus sp.
MSWRPPVHNPNGIQRNLWEAFFRMHAAACGCGDLVGHITVLAGRISNRPKGASMVSPTRQPRARRRLRYRDDNLAVLARRSRSRSPPRSPRGVATAAPPPAVPRAAKNRKATPTRHAPTHQDAEQPAHKSPCPWPCINKVYMFPPEKPMPIHGYHGWETEYQACKAFDRPPRNYLSDKPIYPWLPRSQPEFKVSFKLGCQ

SEQ ID NO: 875 - protein, 765 aa, Alphatorquevirus sp.
MAWWGRWRRWRWRPRRWRRRRRRRVPRRRAQRPVRRRRARRVRRRRWGRRRWRRGYRRRLRLRRRRRRKKIRLTQWNPAKVRRCTIKGVLPMILCGAGRSGFNYGLHSDDYTVQKPLGQNPHGGGMSTVTFSLQVLFDQYQRFMNRWSYSNDQLDLARYFGCTFYFYRHPEIDFVAQYDNVPPMKMDENTAPNTHPSFLLQNKRKIKIPSFKTKPFGRKRVKVTVGPPKLFEDKWYSQHDLCKVPLVSWRLTACDFRFPFCSPLTDNPCYTFQVLHENYYPVIGTSSLENGTNYNNTAITTLETWLYGKCTHYQTFATDTRLNPQRPVSSSNANETYTPSGSKESIIWGQSDWANFKKNTDSNYGYCSYCPSNGTNGTVDKIKKYRDQRFRWLTEMPVPNTCHIHATFARGTIKYWEYHLGWYSNIFIGNLRHNLAFRPAYIDITYNPITDKGEGNIIWFQYLTKPTTEYIETQAKCTITNIPLYAAFYGYEDYLQRTLGPYQDVETLGIICVKCPYTDPPLVHKDKSKTNWGYVFYDAHFGNGKTPEGLGQVHPYWMQRWRPYVQFQKDTMHKISRTGPFSYRDDTPSITLTAEYKFRFNWGGDSIFPQIIKNPCPDTGVRPSTGRDRRSVQVVSPLTMGPQFIFHSWDWRRGFFNQKTLKRMLEKPVNDGEYPTGPKVPRWFPPLDNQEQEGVSDTETTTSQSSQEEAAQEALQEVQEASLQQHLLQQYREQRRIGKQLQLVMLQLTKTQSNLHINPRVLGHA

SEQ ID NO: 876 - protein, 196 aa, Alphatorquevirus sp.
MAWWGRWRRWRWRPRRWRRRRRRRVPRRRAQRPVRRRRARRIIKNPCPDTGVRPSTGRDRRSVQVVSPLTMGPQFIFHSWDWRRGFFNQKTLKRMLEKPVNDGEYPTGPKVPRWFPPLDNQEQEGVSDTETTTSQSSQEEAAQEALQEVQEASLQQHLLQQYREQRRIGKQLQLVMLQLTKTQSNLHINPRVLGHA

SEQ ID NO: 877 - protein, 125 aa, Alphatorquevirus sp.
MAWWGRWRRWRWRPRRWRRRRRRRVPRRRAQRPVRRRRARRNIQQAQRCLDGFPHSTTKSKKASQIQRRQPRSPRKKKPLKKPSKKSKRRRYSSTSSSSTESSEESESNSNSSCSNSPRRRATCT

SEQ ID NO: 878 - DNA, 3264 bp, Gammatorquevirus sp.
  source 1..3264: mol_type = genomic DNA
taaaatggcggcaaccaatcattttatactttcactttccaattacaagccgccacgtcacagaacaggggtggagactttaaaactatataaccaagtgatgtgacgaatggctgagtttaccccgctagacggtgcagggaccggatcgagcgcagcgaggaggtccccggctgcccgtgggcgggagcccgaggtgagtgaaaccaccgaggtctaggggcaattcgggctagggcagtctagcggaacgggcaagaaacttaaaatatgttttgtttcagatgcagacacctgcttcacagataagctcagacgacttctttgtacacactccatttaatgcagtaactaaacagcaaatatggatgtctcaaattgctgatggacatgacaacatttgtcactgccaccgtccttttgctcacctgcttgctaatatttttcctcctggtcataaagacagggatcttaccattaatcaaatacttgctagagatcttacagaaacatgccattctggtggagacgaaggaacaagcggtggtggggtcgccgcttccgctaccgccgctacaacaaatataaaaccagaaggagacgcagaatacccagaagacgaaatagaagatttactaagacacgcaggagaagaaaaagaaagaaggtaagaagaaaacttaaaaaaattactattaaacaatggcagccagattcagtgaaaaaatgtaaaattaaaggatatagtactttagttatgggtgcacaaggaaaacaatacaactgttacacaaaccaagcaagtgactatgttcagcctaaagcaccacaaggtgggggctttggctgtgaagtatttaatttaaaatggctataccaagaatatactgcacacagaaatatttggacaaaaacaaatgaatatacagacctttgtagatacactggagctcaaataattttatacaggcacccagatgttgattttatagtcagctgggacaatcagccaccttttttacttaacaaatatacatatccagaactgcaaccacaaaaccttttactagctagaaggaaaagaattattcttagtcaaaaatcaaaccccaaaggaaaactaagaattaaactaagaataccaccaccaaaacaaatgataacaaaatggttttttcaaagagacttttgtgatgtgaatctgtttaaactatgtgcttctgctgcttctttccgctacccaggtatcagtcatggagctcaaagtactattttttctgcatatgctttaaacactgacttttatcaatgcagtgactggtgccaaactaacacagaaactggctacctaaacattaaaacacaacaaatgccactatggtttcattacagagagggtggcaaagagaaatggtataaatacaccaacaaagaacacagaccatatacaaatacatatcttaaaagtattagctataatgatggattgttttctcctaaagccatgtttgcatttgaagtaaaagcggggggtgaaggaacaacagaaccaccacaaggcgcccaattaattgctaaccttccactcattgcactaagatataatccacatgaagacacaggccatggcaatgaaatttaccttacatcaacttttaaaggtacatatgacaaacctaaagttactgatgctctatactttaacaatgtacccctgtggatgggattttatggctactgggactttatattacaagaaacaaaaaacaaaggtgtctttgatcaacatatgtttgttgttaaatgtcctgccttaaggcccatatcacaagtcacaaaacaagtatactacccacttgtagacatggacttttgttcagggagactgccatttgatgaatatttatccaaagacattaaaagtcattggtatcccactgcagaaagacaaacagttacaataaataattttgttacagcaggtccatacatgcctaaatttgaacccacagacaaagacagtacatggcaattaaactatcactataaatttttttttaagtggggtggtccacaagtcacagacccaactgttgaagacccatgcagcagaaacaaatatcctgtccccgatacaatgcaacaaacaatacaaattaaaaaccctgaaaagctgcacccagcaaccctcttccatgactgggaccttagaaggggcttcattacacaagcagctattaaaagaatgtcagaaaacctccaaattgattcatctttcgaatctgatggcacagaatcacccaaaaaaaagaaaagatgcaccaaagaaatcccaacacaaaaccaaaagcaagaagagatccaagaatgtctcctctcactctgcgaagagcctacatgccaagaagaaacagaggacctccagctcttcatccagcagcagcagcagcagcagtacaagctcagaaaaaacctcttcaaactcctcactcacctgaaaaaaggacagagaataagtcaactacaaacgggacttttagagtaataccatttaaaccaggttttgaacaagaaacagaaaaagaacttgccatagctttctgcagaccacctagaaaatataaaaatgatccccctttttatccctggttaccatggacaccccttgtacactttaaccttaattacaaaggctaggccaacactgttcacttagtggtgtatgtttaataaagtttcacccccaaaaaaaaaaaaaaaaaaaaaaaaaaaaaaaaaaataaaaaattgcaaaaattcggcgctcgcgcgcgctgcgcgcgcgcgagcgccgtcacgcgccggcgctcgcgcgccgcgcgtatgtgctaacacaccacgcacctagattggggtgcgcgcgctagcgcgcgcaccccaatgcgccccgccctcgttccgacccgcttgcgcgggtcggaccacttcgggctcgggggggcgcgcctgcggcgcttttttactaaacagactccgagccgccatttggccccccctaagctccgcccccctcatgaatattcataaaggaaaccacataattagaattgccgaccacaaactgccatatgctaattagttccccttttacacagtaaaaaggggaagtgggggggcatagcccccccacaccccccgcggggggggcagagcccccccccgcaccccccccctacgtcacaatccacgcccccgccgccatcttgggtgcggcagggcgggggc

SEQ ID NO: 879 - protein, 128 aa, Gammatorquevirus sp.
MQTPASQISSDDFFVHTPFNAVTKQQIWMSQIADGHDNICHCHRPFAHLLANIFPPGHKDRDLTINQILARDLTETCHSGGDEGTSGGGVAASATAATTNIKPEGDAEYPEDEIEDLLRHAGEEKERR

SEQ ID NO: 880 - protein, 272 aa, Gammatorquevirus sp.
MQTPASQISSDDFFVHTPFNAVTKQQIWMSQIADGHDNICHCHRPFAHLLANIFPPGHKDRDLTINQILARDLTETCHSGGDEGTSGGGVAASATAATTNIKPEGDAEYPEDEIEDLLRHAGEEKERSGVVHKSQTQLLKTHAAETNILSPIQCNKQYKLKTLKSCTQQPSSMTGTLEGASLHKQLLKECQKTSKLIHLSNLMAQNHPKKRKDAPKKSQHKTKSKKRSKNVSSHSAKSLHAKKKQRTSSSSSSSSSSSSTSSEKTSSNSSLT

SEQ ID NO: 881 - protein, 261 aa, Gammatorquevirus sp.
MQTPASQISSDDFFVHTPFNAVTKQQIWMSQIADGHDNICHCHRPFAHLLANIFPPGHKDRDLTINQILARDLTETCHSGGDEGTSGGGVAASATAATTNIKPEGDAEYPEDEIEDLLRHAGEEKERRITQKKEKMHQRNPNTKPKARRDPRMSPLTLRRAYMPRRNRGPPALHPAAAAAAVQAQKKPLQTPHSPEKRTENKSTTNGTFRVIPFKPGFEQETEKELAIAFCRPPRKYKNDPPFYPWLPWTPLVHFNLNYKG

SEQ ID NO: 882 - protein, 67 aa, Gammatorquevirus sp.
MDMTTFVTATVLLLTCLLIFFLLVIKTGILPLIKYLLEILQKHAILVETKEQAVVGSPLPLPPLQQI

SEQ ID NO: 883 - protein, 677 aa, Gammatorquevirus sp.
MPFWWRRRNKRWWGRRFRYRRYNKYKTRRRRRIPRRRNRRFTKTRRRRKRKKVRRKLKKITIKQWQPDSVKKCKIKGYSTLVMGAQGKQYNCYTNQASDYVQPKAPQGGGFGCEVFNLKWLYQEYTAHRNIWTKTNEYTDLCRYTGAQIILYRHPDVDFIVSWDNQPPFLLNKYTYPELQPQNLLLARRKRIILSQKSNPKGKLRIKLRIPPPKQMITKWFFQRDFCDVNLFKLCASAASFRYPGISHGAQSTIFSAYALNTDFYQCSDWCQTNTETGYLNIKTQQMPLWFHYREGGKEKWYKYTNKEHRPYTNTYLKSISYNDGLFSPKAMFAFEVKAGGEGTTEPPQGAQLIANLPLIALRYNPHEDTGHGNEIYLTSTFKGTYDKPKVTDALYFNNVPLWMGFYGYWDFILQETKNKGVFDQHMFVVKCPALRPISQVTKQVYYPLVDMDFCSGRLPFDEYLSKDIKSHWYPTAERQTVTINNFVTAGPYMPKFEPTDKDSTWQLNYHYKFFFKWGGPQVTDPTVEDPCSRNKYPVPDTMQQTIQIKNPEKLHPATLFHDWDLRRGFITQAAIKRMSENLQIDSSFESDGTESPKKKKRCTKEIPTQNQKQEEIQECLLSLCEEPTCQEETEDLQLFIQQQQQQQYKLRKNLFKLLTHLKKGQRISQLQTGLLE

SEQ ID NO: 884 - protein, 212 aa, Gammatorquevirus sp.
MPFWWRRRNKRWWGRRFRYRRYNKYKTRRRRRIPRRRNRRFTKTRRRRKRKKWGGPQVTDPTVEDPCSRNKYPVPDTMQQTIQIKNPEKLHPATLFHDWDLRRGFITQAAIKRMSENLQIDSSFESDGTESPKKKKRCTKEIPTQNQKQEEIQECLLSLCEEPTCQEETEDLQLFIQQQQQQQYKLRKNLFKLLTHLKKGQRISQLQTGLLE

SEQ ID NO: 885 - protein, 119 aa, Gammatorquevirus sp.
MPFWWRRRNKRWWGRRFRYRRYNKYKTRRRRRIPRRRNRRFTKTRRRRKRKKNHPKKRKDAPKKSQHKTKSKKRSKNVSSHSAKSLHAKKKQRTSSSSSSSSSSSSTSSEKTSSNSSLT

SEQ ID NO: 886 - DNA, 3176 bp, Gammatorquevirus sp.
  source 1..3176: mol_type = genomic DNA
taaaatggcgggagccaatcattttatactttcactttccaattaaaaatggccacgtcacaaacaaggggtggagccatttaaactatataactaagtggggtggcgaatggctgagtttaccccgctagacggtgcagggaccggatcgagcgcagcgaggaggtccccggctgcccatgggcgggagccgaggtgagtgaaaccaccgaggtctaggggcaattcgggctagggcagtctagcggaacgggcaagaaacttaaaacaatatttgttttacagatggttagtatatcctcaagtgatttttttaagaaaacgaaatttaatgaggagacgcagaaccaagtatggatgtctcaaattgctgactctcatgataatatctgcagttgctggcatccatttgctcaccttcttgcttccatatttcctcctggccacaaagatcgtgatcttactattaaccaaattcttctaagagattataaagaaaaatgccattctggtggagaagaaggagaaaattctggaccaacaacaggtttaattacaccaaaagaagaagatatagaaaaagatggcccagaaggcgccgcagaagaagaccatacagacgccctgttcgccgccgccgtagaaaacttcgaaaggtaaagagaaaaaaaaaatctttaattgttagacaatggcaaccagacagtataagaacttgtaaaattataggacagtcagctatagttgttggggctgaaggaaagcaaatgtactgttatactgtcaataagttaattaatgtgcccccaaaaacaccatatgggggaggctttggagtagaccaatacacactgaaatacttatatgaagaatacagatttgcacaaaacatttggacacaatctaatgtactgaaagacttatgcagatacataaatgttaagctaatattctacagagacaacaaaacagactttgtcctttcctatgacagaaacccaccttttcaactaacaaaatttacatacccaggagcacacccacaacaaatcatgcttcaaaaacaccacaaattcatactatcacaaatgacaaagcctaatggaagactaacaaaaaaactcaaaattaaacctcctaaacaaatgctttctaaatggttcttttcaaaacaattctgtaaataccctttactatctcttaaagcttctgcactagaccttaggcactcttacctaggctgctgtaatgaaaatccacaggtatttttttattatttaaaccatggatactacacaataacaaactggggagcacaatcctcaacagcatacagacctaactccaaggtgacagacacaacatactacagatacaaaaatgacagaaaaaatattaacattaaaagccatgaatacgaaaaaagtatatcatatgaaaacggttattttcaatctagtttcttacaaacacagtgcatatataccagtgagcgtggtgaagcctgtatagcagaaaaaccactaggaatagctatttacaatccagtaaaagacaatggagatggtaatatgatataccttgtaagcactctagcaaacacttgggaccagcctccaaaagacagtgctattttaatacaaggagtacccatatggctaggcttatttggatatttagactactgtagacaaattaaagctgacaaaacatggctagacagtcatgtactagtaattcaaagtcctgctatttttacttacccaaatccaggagcaggcaaatggtattgtccactatcacaaagttttataaatggcaatggtccgtttaatcaaccacctacactgctacaaaaagcaaagtggtttccacaaatacaataccaacaagaaattattaatagctttgtagaatcaggaccatttgttcccaaatatgcaaatcaaactgaaagcaactgggaactaaaatataaatatgtttttacatttaagtggggtggaccacaattccatgaaccagaaattgctgaccctagcaaacaagagcagtatgatgtccccgatactttctaccaaacaatacaaattgaagatccagaaggacaagaccccagatctctcatccatgattgggactacagacgaggctttattaaagaaagatctcttaaaagaatgtcaacttacttctcaactcatacagatcagcaagcaacttcagaggaagacattcccaaaaagaaaaagagaattggaccccaactcacagtcccacaacaaaaagaagaggagacactgtcatgtctcctctctctctgcaaaaaagataccttccaagaaacagagacacaagaagacctccagcagctcatcaagcagcagcaggagcagcagctcctcctcaagagaaacatcctccagctcatccacaaactaaaagagaatcaacaaatgcttcagcttcacacaggcatgttaccttaaccagatttaaacctggatttgaagagcaaacagagagagaattagcaattatatttcataggccccctagaacctacaaagaggaccttccattctatccctggctaccacctgcaccccttgtacaatttaaccttaacttcaaaggctaggccaacaatgtacacttagtaaagcatgtttattaaagcacaacccccaaaataaatgtaaaaataaaaaaaaaaaaaaaaaaataaaaaattgcaaaaattcggcgctcgcgcgcatgtgcgcctctggcgcaaatcacgcaacgctcgcgcgcccgcgtatgtctctttaccacgcacctagattggggtgcgcgcgctagcgcgcgcaccccaatgcgccccgccctcgttccgacccgcttgcgcgggtcggaccacttcgggctcgggggggcgcgcctgcggcgcttttttactaaacagactccgagccgccatttggccccctaagctccgcccccctcatgaatattcataaaggaaaccacataattagaattgccgaccacaaactgccatatgctaattagttccccttttacaaagtaaaaggggaagtgaacatagccccacacccgcaggggcaaggccccgcacccctacgtcactaaccacgcccccgccgccatcttgggtgcggcagggcgggggc

SEQ ID NO: 887 - protein, 124 aa, Gammatorquevirus sp.
MVSISSSDFFKKTKFNEETQNQVWMSQIADSHDNICSCWHPFAHLLASIFPPGHKDRDLTINQILLRDYKEKCHSGGEEGENSGPTTGLITPKEEDIEKDGPEGAAEEDHTDALFAAAVENFER

SEQ ID NO: 888 - protein, 271 aa, Gammatorquevirus sp.
MVSISSSDFFKKTKFNEETQNQVWMSQIADSHDNICSCWHPFAHLLASIFPPGHKDRDLTINQILLRDYKEKCHSGGEEGENSGPTTGLITPKEEDIEKDGPEGAAEEDHTDALFAAAVENFESGVDHNSMNQKLLTLANKSSMMSPILSTKQYKLKIQKDKTPDLSSMIGTTDEALLKKDLLKECQLTSQLIQISKQLQRKTFPKRKRELDPNSQSHNKKKRRHCHVSSLSAKKIPSKKQRHKKTSSSSSSSSRSSSSSSRETSSSSSTN

SEQ ID NO: 889 - protein, 267 aa, Gammatorquevirus sp.
MVSISSSDFFKKTKFNEETQNQVWMSQIADSHDNICSCWHPFAHLLASIFPPGHKDRDLTINQILLRDYKEKCHSGGEEGENSGPTTGLITPKEEDIEKDGPEGAAEEDHTDALFAAAVENFERSASNFRGRHSQKEKENWTPTHSPTTKRRGDTVMSPLSLQKRYLPRNRDTRRPPAAHQAAAGAAAPPQEKHPPAHPQTKRESTNASASHRHVTLTRFKPGFEEQTERELAIIFHRPPRTYKEDLPFYPWLPPAPLVQFNLNFKG

SEQ ID NO: 890 - protein, 50 aa, Gammatorquevirus sp.
MRRRRTKYGCLKLLTLMIISAVAGIHLLTFLLPYFLLATKIVILLLTKFF

SEQ ID NO: 891 - protein, 662 aa, Gammatorquevirus sp.
MPFWWRRRRKFWTNNRFNYTKRRRYRKRWPRRRRRRRPYRRPVRRRRRKLRKVKRKKKSLIVRQWQPDSIRTCKIIGQSAIVVGAEGKQMYCYTVNKLINVPPKTPYGGGFGVDQYTLKYLYEEYRFAQNIWTQSNVLKDLCRYINVKLIFYRDNKTDFVLSYDRNPPFQLTKFTYPGAHPQQIMLQKHHKFILSQMTKPNGRLTKKLKIKPPKQMLSKWFFSKQFCKYPLLSLKASALDLRHSYLGCCNENPQVFFYYLNHGYYTITNWGAQSSTAYRPNSKVTDTTYYRYKNDRKNINIKSHEYEKSISYENGYFQSSFLQTQCIYTSERGEACIAEKPLGIAIYNPVKDNGDGNMIYLVSTLANTWDQPPKDSAILIQGVPIWLGLFGYLDYCRQIKADKTWLDSHVLVIQSPAIFTYPNPGAGKWYCPLSQSFINGNGPFNQPPTLLQKAKWFPQIQYQQEIINSFVESGPFVPKYANQTESNWELKYKYVFTFKWGGPQFHEPEIADPSKQEQYDVPDTFYQTIQIEDPEGQDPRSLIHDWDYRRGFIKERSLKRMSTYFSTHTDQQATSEEDIPKKKKRIGPQLTVPQQKEEETLSCLLSLCKKDTFQETETQEDLQQLIKQQQEQQLLLKRNILQLIHKLKENQQMLQLHTGMLP

SEQ ID NO: 892 - protein, 215 aa, Gammatorquevirus sp.
MPFWWRRRRKFWTNNRFNYTKRRRYRKRWPRRRRRRRPYRRPVRRRRRKLRKWGGPQFHEPEIADPSKQEQYDVPDTFYQTIQIEDPEGQDPRSLIHDWDYRRGFIKERSLKRMSTYFSTHTDQQATSEEDIPKKKKRIGPQLTVPQQKEEETLSCLLSLCKKDTFQETETQEDLQQLIKQQQEQQLLLKRNILQLIHKLKENQQMLQLHTGMLP

SEQ ID NO: 893 - protein, 129 aa, Gammatorquevirus sp.
MPFWWRRRRKFWTNNRFNYTKRRRYRKRWPRRRRRRRPYRRPVRRRRRKLRKISKQLQRKTFPKRKRELDPNSQSHNKKKRRHCHVSSLSAKKIPSKKQRHKKTSSSSSSSSRSSSSSSRETSSSSSTN

SEQ ID NO: 894 - DNA, 3696 bp, Alphatorquevirus sp.
  source 1..3696: mol_type = genomic DNA
attttgttcagcccgccaatttctctttcaaacaggccaatcagctactacttcgtgcacttcctggggcgtgtcctgccgctctatataagcagaggcggtgacgaatggtagagtttttcttggcccgtccgcggcgagagcgcgagcgaagcgagcgatcgagcgtcccgagggcgggtgccggaggtgagtttacacaccgcagtcaaggggcaattcgggctcgggactggccgggctatgggcaagattcttaaaaaattcccccgatccctttgccgccaggacataaaaacatgccgtggagaccgccggtccatagtgtccaggggcgagaggatcagtggttcgcaagcttttttcacggccacgattcgttttgcggctgcggtgaccctcttggccatattaatagcattgctcatcgctttcctcgcgccggtccaccaaggccccctccggggctagatcagcctaacccccgggagcagggcccggccggacccggagggccgcccgccatcttggccctgccggctccgcccgcggagcctgacgacccgcagccacggcgtggtggtggggacggtggcgccgccgctggcgccgcagacgaccatacacaacgagactacgacgaagaagagctagacgagcttttccgcgccgccgccgaagacgatttgtaagtaggagatggcgccggccttacaggcgcaggaggagacgcgggcgacgcagacgcagacgcagacgcagacataagcccaccctaatactcagacagtggcaacctgactgtatcagacactgtaaaataacaggatggatgcccctcattatctgtggaaaggggtccacccagttcaactacatcacccacgcggacgatatcacccccaggggagcctcctacggaggcaatttcacaaacatgactttctccctggaggccatatatgaacagttcctataccacagaaacaggtggtcggcctctaaccacgacctagaactgtgcagatacaaggggaccaccttaaaactctacagacacccagaagtagactacatagttacctacagcagaacaggaccctttgaaatcagccacatgacctacctcagcactcaccccatgctaatgctgctaaacaagcaccacattgtggtgcccagcttaaagactaagcccagaggcagaaaggccataaaagtcaggataaggcccccaaaactcatgaacaacaagtggtacttcaccagagacttctgtaacataggcctcttccagctctgggccacaggcttagaactcagaaacccctggctcagaatgagcaccctgagcccctgcataggctttaatgtcctcaaaaacagcatttacacaaacctcagcaacctgccacaatacaaaaacgaaagactaaacatcattaacaacatacttcacccacaagaaattacaggtacaaacaacaaaaagtggcagtacacatacaccaaactcatggcccctatttactattcagcaaacagggccagcacctatgactgggaaaattacagcaaagaaacaaactacaataatacatatgttaaatttacccagaaaagacaggaaaaactaactaaaattagaaaagagtggcagatgctttatccacaacaacccacagcactgccagactcctatgacctcctacaagagtatggcctctacagtccatactacctaaaccccacaagaataaacctagactggatgaccccatacacacacgtcagatacaatcccctagtagacaagggctttggaaacagaatatacatccagtggtgctcagaagcagatgttagctacaacaggacaaaatccaagtgtctgctacaagacatgcccctgtttttcatgtgctatggctacatagactgggcaataaaaaacactggagtgtcatctctagtgaaggacgccagaatctgcatcaggtgtccctacacagagccacaactagttggctccacagaagacataggctttgtacccatctcagaaaccttcatgaggggcgacatgccggtacttgcaccatacataccgttaagctggttttgcaagtggtatcccaacatagctcaccaaaaggaagtccttgagtcaatcatttcctgcagccccttcatgccccgtgaccaagacatgaacggttgggatatcacaatcggttacaaaatggacttcttatggggcggttcccctctcccctcacagccaatcgacgacccctgccagcagggaacccacccgattcccgaccccgataaacaccctcgcctcctacaagtctcgaacccgaaactactcggaccgaggacagtgttccacaagtgggacatcagacgtgggcagtttagcaaaagaagtattaagagagtgtcagaatactcaagcgatgatgaatctcttgcgccaggtctcccatcaaagcgaaacaagctcgactcggcgttccgaggagaaaatcgagagcaaaaagaatgctattctctcctcaaagcgctcgaggaagaagagaccccagaagaagaagaaccagcaccccaagaaaaagcccagaaagaggagctactccaccagctccagctccagagacgccaccagcgagtcctcagacgagggctcaagctcgtctttacagacatcctccgactccgccagggagtccactggaacccggagctcacatagcgcccccaccttacataccagacctgctttttcccaatactggtaaaaaaaaaaaattctctcccttcgattgggagacagaggcgcaaatagcggggtggatgcggcggcccatgcgcttctatccctcagacacccctcactacccgtggctaccccccgagcgagatatcccgaaaatatgtaacataaacttcaaaataaagcttcaagagtgagtgattcgaggccctcctctgttcacttagcggtgtctacctcttaaggtcactaagcactccgagcgtaagcgaggagtgcgaccctctaccaaggggcaacttcctcggggtccggcgctacgcgcttcgcgctgcgccggacatctcggacccctcgacccgaatcgcttgcgcgattcggacctgcggcctcgggggggtcgggggctttactaaacagactccgaggtgccattggacactgtagggggtgaacagcaacgaaagtgagtggggccagacttcgccataaggcctttatcttcttgccattggatagtgacttccgggtccgcctgggggccgccattttagcttcggccgccattttaggccctcgcgggcctccgtaggcgcgctttagtgacgtcacggcagccattttgtcgtgacgtttgagacacgtgatgggggcgtgcctaaacccggaagcatccctggtcacgtgactctgacgtcacggcggccatcttgtgctgtccgccatcttgtaacttccttccgctttttcaaaaaaaaagaggaagtgtgacgtagcggcgggggggcggcgcgcttcgcgcgccgcccaccagggggcgctgcgcgccccccgcgcatgcgcaggggcctctcgaggggctccgccccccccccgtgctaaatttaccgcgcatgcgcgaccacgcccccgccgcc

SEQ ID NO: 895 - protein, 130 aa, Alphatorquevirus sp.
MPWRPPVHSVQGREDQWFASFFHGHDSFCGCGDPLGHINSIAHRFPRAGPPRPPPGLDQPNPREQGPAGPGGPPAILALPAPPAEPDDPQPRRGGGDGGAAAGAADDHTQRDYDEEELDELFRAAAEDDL

SEQ ID NO: 896 - protein, 303 aa, Alphatorquevirus sp.
MPWRPPVHSVQGREDQWFASFFHGHDSFCGCGDPLGHINSIAHRFPRAGPPRPPPGLDQPNPREQGPAGPGGPPAILALPAPPAEPDDPQPRRGGGDGGAAAGAADDHTQRDYDEEELDELFRAAAEDDFQSTTPASREPTRFPTPINTLASYKSRTRNYSDRGQCSTSGTSDVGSLAKEVLRECQNTQAMMNLLRQVSHQSETSSTRRSEEKIESKKNAILSSKRSRKKRPQKKKNQHPKKKPRKRSYSTSSSSRDATSESSDEGSSSSLQTSSDSARESTGTRSSHSAPTLHTRPAFSQYW

SEQ ID NO: 897 - protein, 292 aa, Alphatorquevirus sp.
MPWRPPVHSVQGREDQWFASFFHGHDSFCGCGDPLGHINSIAHRFPRAGPPRPPPGLDQPNPREQGPAGPGGPPAILALPAPPAEPDDPQPRRGGGDGGAAAGAADDHTQRDYDEEELDELFRAAAEDDLSPIKAKQARLGVPRRKSRAKRMLFSPQSARGRRDPRRRRTSTPRKSPERGATPPAPAPETPPASPQTRAQARLYRHPPTPPGSPLEPGAHIAPPPYIPDLLFPNTGKKKKFSPFDWETEAQIAGWMRRPMRFYPSDTPHYPWLPPERDIPKICNINFKIKLQ

SEQ ID NO: 898 - protein, 180 aa, Alphatorquevirus sp.
MPWRPPVHSVQGREDQWSPIKAKQARLGVPRRKSRAKRMLFSPQSARGRRDPRRRRTSTPRKSPERGATPPAPAPETPPASPQTRAQARLYRHPPTPPGSPLEPGAHIAPPPYIPDLLFPNTGKKKKFSPFDWETEAQIAGWMRRPMRFYPSDTPHYPWLPPERDIPKICNINFKIKLQE

SEQ ID NO: 899 - protein, 49 aa, Alphatorquevirus sp.
IVSRGERISGSQAFFTATIRFAAAVTLLAILIALLIAFLAPVHQGPLRG

SEQ ID NO: 900 - protein, 728 aa, Alphatorquevirus sp.
TAWWWGRWRRRWRRRRPYTTRLRRRRARRAFPRRRRRRFVSRRWRRPYRRRRRRGRRRRRRRRRHKPTLILRQWQPDCIRHCKITGWMPLIICGKGSTQFNYITHADDITPRGASYGGNFTNMTFSLEAIYEQFLYHRNRWSASNHDLELCRYKGTTLKLYRHPEVDYIVTYSRTGPFEISHMTYLSTHPMLMLLNKHHIVVPSLKTKPRGRKAIKVRIRPPKLMNNKWYFTRDFCNIGLFQLWATGLELRNPWLRMSTLSPCIGFNVLKNSIYTNLSNLPQYKNERLNIINNILHPQEITGTNNKKWQYTYTKLMAPIYYSANRASTYDWENYSKETNYNNTYVKFTQKRQEKLTKIRKEWQMLYPQQPTALPDSYDLLQEYGLYSPYYLNPTRINLDWMTPYTHVRYNPLVDKGFGNRIYIQWCSEADVSYNRTKSKCLLQDMPLFFMCYGYIDWAIKNTGVSSLVKDARICIRCPYTEPQLVGSTEDIGFVPISETFMRGDMPVLAPYIPLSWFCKWYPNIAHQKEVLESIISCSPFMPRDQDMNGWDITIGYKMDFLWGGSPLPSQPIDDPCQQGTHPIPDPDKHPRLLQVSNPKLLGPRTVFHKWDIRRGQFSKRSIKRVSEYSSDDESLAPGLPSKRNKLDSAFRGENREQKECYSLLKALEEEETPEEEEPAPQEKAQKEELLHQLQLQRRHQRVLRRGLKLVFTDILRLRQGVHWNPELT

SEQ ID NO: 901 - protein, 197 aa, Alphatorquevirus sp.
TAWWWGRWRRRWRRRRPYTTRLRRRRARRAFPRRRRRRFPIDDPCQQGTHPIPDPDKHPRLLQVSNPKLLGPRTVFHKWDIRRGQFSKRSIKRVSEYSSDDESLAPGLPSKRNKLDSAFRGENREQKECYSLLKALEEEETPEEEEPAPQEKAQKEELLHQLQLQRRHQRVLRRGLKLVFTDILRLRQGVHWNPELT

SEQ ID NO: 902 - protein, 145 aa, Alphatorquevirus sp.
TAWWWGRWRRRWRRRRPYTTRLRRRRARRAFPRRRRRRFVSHQSETSSTRRSEEKIESKKNAILSSKRSRKKRPQKKKNQHPKKKPRKRSYSTSSSSRDATSESSDEGSSSSLQTSSDSARESTGTRSSHSAPTLHTRPAFSQYW

SEQ ID NO: 903 - DNA, 3828 bp, Alphatorquevirus sp.
  source 1..3828: mol_type = genomic DNA
gtgctacgtcactaacctacgtgtccgtctcccataggccggacaccgtatacgtcatacacttcctgggcatggtctacgtgataatataagtggctgcacttccgaatggctgagttttccacgcccgtccgcagcgaggacgccacggagggggatccgcgcgtcccgagggcgggtgccggaggtgagtttacacaccgcagtcaaggggcaattcgggctcgggactggccgggctatgggcaaggctcttaaaaatgcacttttctaggtgcagtagaaagaaaaggacattgtcactgctaccactgtaccattcacagaaagctaggccatctgtgacaggtatgtggagacccccgactcgaaatgcgttcaatattcaacgtgactggttctacagttgctttcactcccacgcttctatgtgcggctgtgctgattttattggtcatttcaatcatatcgctgctatgctcggccgtccggaagaccagaaccctcctccgccacccggggctctgagacccctacccgctctcccggcctcttccgaggcacccggtgatcgagcgccatggcctatgggtggtggcggaggcgacggaggcgcccgtggtggaggaggagatggcgccgctggagacgccgtcggagaccccgcagacgccgacctcgtcgccgctatcgacgccgcagaacagtaaggaggcgcggcagggggaggtggactagagcacacaggagatggcgccgcaagggaaaacgcagtcgcaaaaaaaagattattataagacaatggcagcccaactacactcgcagatgcaacatagtgggctacatgcctctactaatatgtggggaaaatactgttgctacaaactatgccacccactcagacgacagctactaccccggaccctttggggggggaatgactacagacaaatttactctaagaatactgtatgatgagtacaaaaggttcatgaactactggacctcttcaaacgaggacctagacctatgtagatacctgggatgcactctatatgtgtttagacacccagaagtagactttataatcattataaatacctctcctccattcctagacacagaaataacagggcctagcatacacccaggtatgatggcccttaacaaaagaagcagatggatacctagcataaaaaacagaccaggcagaaagcactatataaagattaaagtaggagccccccgaatgttcacagataagtggtacccccaaacagacctctgtgacatgacactcctaacgatctttgccagtgcggcggatatgcaatatccgttcggctcaccactaactgacaccatagttgtgtcattccaagttctgcaatccatgtacaacgactgcctgagtgtacttcctgataattttgcagagacatcaggcaaaggcacccaactacatgagaacataatacaacatctgccctactacaacaccacacaaacacaagcacaatttaaaagatttatagaaaacatgaatgcaacaaatggagacaatatatgggcaagctacataaacacaaccaagttctcatccgcaaacactccaaagaatgacacaggcataggaggcccttacactacatattcagactcatggtacaaaggcacagtatacaatgacaaaattaaaaccataccaataaaagcaagcaagttatactacgagcaaaccaaaaacctcattggcattacattcactggatccacacacagactccattactgtggaggcctatactcctccgtatggctatcagcaggtagatcctactttgaaaccaaaggcccatacacagacataacttacaaccccttttcagacagaggagagggtaacatgctatggatagactggctaactaaaaatgactcagtgtactcaaaaacaagtagcaagtgtcttatagaaaacctgcccctgtgggcctcagtatacggatataaagaatactgcagcaaggtaacaggagacacaaacatagaacacaactgtagatgtgttatcagaagcccctacacagtaccacaactgttagaccacaacaatcccttcagaggatacgtgccttatagcttcaactttggaaatggtaaaatgccaggcggtagcagcctagtgcccattagaatgagagccaagtggtaccccactctgttccaccaaaaagaagttctagaagccatagcacaggcgggccccttcgcataccactcagatattaaaaaagtgtccctgggcataaagtacagatttaagtgggtgtggggtggcaaccccgtgtcccaacaggttgttagaaacccctgcaagaccacccaaggttcctcgggcaatagagtgcctcgatcaatacaagtcgttgacccgcggtacaacacgccagaactcaccatacacgcgtgggacttcagacatgggttctttggcagaaaagctattaagagaatgcaagaacaaccaatacctcatgacactttttcagcagggttcaagcgcagtcgccgagatacagaagcactccaatgcagccaagaagagcaacaaaaagaaaacttacttttcccagtccagcagctcaagcgagtccccccgtgggagacctcgcaagagagccaaagcgaggaagaaaactcgcaaaaacaggagaccctctcccagcaactcagagaccagctgcacaagcagcggctcatgggagagcaactccgatcgctcctctaccaaatgcagagggtccaacaaaatcaacacataaaccctatgttattgccaaagggtctggcattaacttctatttctcacaatgtaatatagatatgtttggtgaccccaaaccctacaagccctcctccaatgactggaaggaggagtacgaggccgcaaagtactgggacagaccccccagacgcgacctgaggagcacccccttctacccctgggcccccacccccaaaccatacaatgtcaactttgccctcaactacaaataaacggtggccgtgggagtttcacttgtcggtgtctacctcttaaggtcactaagcactccgagcgtaagcgaggagtgcgacccttcaccaagggcaactccctcgaagtccggcgctacgcgcttcgcgctgcgccggacatctcggaccccccctcgacccgaatcgcttgcgcgattcggacctgcggcctcgggggggtcgggggctttactaaacagactccgaggtgccattggacactgagggggtgaacagcaacgaaagtgagtggggccagacttcgccataaggcctttatcttcttgccatttgtccgcgaccgggggtcgctcctaggcgcggaccccgtttcggggtccttccgggttcatcggcgccgttccagtgacgtcacgggcgccatgttaagtggctgtcgccgaggattgacgtcacagttcaaaggtcatcctcggcggtaaccgcaaacatggcggtcaatctcttccgggtcaaaggtcgtgcatacgtcataagtcacatgacaggggtccacttaaacacggaagtaggccccgacatgtgactcgtcacgtgtgtacacgtcacggccgccattttgttttacaaaatggccgacttccttcctgttttttaaaaaaaggcgcgaaaaaaccgtcggcgggggccgcgcgctgcgcgcgcgggaggcaatgcctccccccccccgcgcgcatgcgcgcgggtccccccccctccggggggctccgccccccggcccccccc

SEQ ID NO: 904 - protein, 119 aa, Alphatorquevirus sp.
MWRPPTRNAFNIQRDWFYSCFHSHASMCGCADFIGHFNHIAAMLGRPEDQNPPPPPGALRPLPALPASSEAPGDRAPWPMGGGGGDGGARGGGGDGAAGDAVGDPADADLVAAIDAAEQ

SEQ ID NO: 905 - protein, 273 aa, Alphatorquevirus sp.
MWRPPTRNAFNIQRDWFYSCFHSHASMCGCADFIGHFNHIAAMLGRPEDQNPPPPPGALRPLPALPASSEAPGDRAPWPMGGGGGDGGARGGGGDGAAGDAVGDPADADLVAAIDAAEQLLETPARPPKVPRAIECLDQYKSLTRGTTRQNSPYTRGTSDMGSLAEKLLRECKNNQYLMTLFQQGSSAVAEIQKHSNAAKKSNKKKTYFSQSSSSSESPRGRPRKRAKARKKTRKNRRPSPSNSETSCTSSGSWESNSDRSSTKCRGSNKINT

SEQ ID NO: 906 - protein, 286 aa, Alphatorquevirus sp.
MWRPPTRNAFNIQRDWFYSCFHSHASMCGCADFIGHFNHIAAMLGRPEDQNPPPPPGALRPLPALPASSEAPGDRAPWPMGGGGGDGGARGGGGDGAAGDAVGDPADADLVAAIDAAEQVQAQSPRYRSTPMQPRRATKRKLTFPSPAAQASPPVGDLAREPKRGRKLAKTGDPLPATQRPAAQAAAHGRATPIAPLPNAEGPTKSTHKPYVIAKGSGINFYFSQCNIDMFGDPKPYKPSSNDWKEEYEAAKYWDRPPRRDLRSTPFYPWAPTPKPYNVNFALNYK

SEQ ID NO: 907 - protein, 51 aa, Alphatorquevirus sp.
MRSIFNVTGSTVAFTPTLLCAAVLILLVISIISLLCSAVRKTRTLLRHPGL

SEQ ID NO: 908 - protein, 767 aa, Alphatorquevirus sp.
MAYGWWRRRRRRPWWRRRWRRWRRRRRPRRRRPRRRYRRRRTVRRRGRGRWTRAHRRWRRKGKRSRKKKIIIRQWQPNYTRRCNIVGYMPLLICGENTVATNYATHSDDSYYPGPFGGGMTTDKFTLRILYDEYKRFMNYWTSSNEDLDLCRYLGCTLYVFRHPEVDFIIIINTSPPFLDTEITGPSIHPGMMALNKRSRWIPSIKNRPGRKHYIKIKVGAPRMFTDKWYPQTDLCDMTLLTIFASAADMQYPFGSPLTDTIVVSFQVLQSMYNDCLSVLPDNFAETSGKGTQLHENIIQHLPYYNTTQTQAQFKRFIENMNATNGDNIWASYINTTKFSSANTPKNDTGIGGPYTTYSDSWYKGTVYNDKIKTIPIKASKLYYEQTKNLIGITFTGSTHRLHYCGGLYSSVWLSAGRSYFETKGPYTDITYNPFSDRGEGNMLWIDWLTKNDSVYSKTSSKCLIENLPLWASVYGYKEYCSKVTGDTNIEHNCRCVIRSPYTVPQLLDHNNPFRGYVPYSFNFGNGKMPGGSSLVPIRMRAKWYPTLFHQKEVLEAIAQAGPFAYHSDIKKVSLGIKYRFKWVWGGNPVSQQVVRNPCKTTQGSSGNRVPRSIQVVDPRYNTPELTIHAWDFRHGFFGRKAIKRMQEQPIPHDTFSAGFKRSRRDTEALQCSQEEQQKENLLFPVQQLKRVPPWETSQESQSEEENSQKQETLSQQLRDQLHKQRLMGEQLRSLLYQMQRVQQNQHINPMLLPKGLALTSISHNVI

SEQ ID NO: 909 - protein, 216 aa, Alphatorquevirus sp.
MAYGWWRRRRRRPWWRRRWRRWRRRRRPRRRRPRRRYRRRRTVVRNPCKTTQGSSGNRVPRSIQVVDPRYNTPELTIHAWDFRHGFFGRKAIKRMQEQPIPHDTFSAGFKRSRRDTEALQCSQEEQQKENLLFPVQQLKRVPPWETSQESQSEEENSQKQETLSQQLRDQLHKQRLMGEQLRSLLYQMQRVQQNQHINPMLLPKGLALTSISHNVI

SEQ ID NO: 910 - protein, 131 aa, Alphatorquevirus sp.
MAYGWWRRRRRRPWWRRRWRRWRRRRRPRRRRPRRRYRRRRTGSSAVAEIQKHSNAAKKSNKKKTYFSQSSSSSESPRGRPRKRAKARKKTRKNRRPSPSNSETSCTSSGSWESNSDRSSTKCRGSNKINT

SEQ ID NO: 911 - DNA, 3815 bp, Alphatorquevirus sp.
  source 1..3815: mol_type = genomic DNA
aagatcgtcactaaccacgtgactcctctcgcccaatcagtgtctacgtcgtccatttcctgggcatggtctacatcctgatataaagcgatgcacttccgaatggctgagttttccacgcccgtccgcggcgagatcgcgacggaggagcgatcgagcgtcccgagggcgggtgccggaggtgagtttacacaccgcagtcaaggggcaattcgggctcgggactggccgggctatgggcaaggctcttaaagcgtacgtcccccgctatgtttctcggcagggtgtggaggaaacagaaaaggaaagtgcttctgctggctgtgcgagctacacagaaaacatcttccatgagtatctggcgtcccccccttgggaatgtctcctacagggagagaaattggcttcaggccgtcgaaacatcccacagttctttttgtggctgtggtgattttattcttcatcttactaatttggctgcacgctttgctctccaggggcccccgccagagggtggtccacctcggccgaggccgccgctcctgagagcgctgccggcccccgaggtccgcagggagacgcgcacagagaaccggggcgcctccggtgagccatggcctggcgatggtggtggcagagacgatggcgccgccgccggtggccccgcagacggtggagacgcctacgacgccggagacctagacgacctgttcgccgccgtcgaagaagaacaacagtaaggaggcggaggtggaggggcagacgtgggcgacgcacatacacccgacgcgcggtcagacgcagacgcagacccagaaagagacttgtactgactcagtggagcccccagacagtcagaaactgctcaataaggggcatagtgcccatggtaatatgcggacacacaaaagcaggtagaaactatgctattcatagcgaggacttcaccacacagatacaacccttcgggggcagtttcagcacgaccacctggtccctaaaagtgctgtgggacgagcaccagaaattccagaacagatggtcctacccaaacacacaactagacctggccagatacagaggggtcaccttctggttctacagagaccagaaaacagactatatagtacagtggagtaggaatcccccttttaaactcaataaatacagcagtgccatgtaccacccgggcatgatgatgcaggccaaaaggaaactagttgtacctagtttccagaccagacccaaaggcaagaagagatacagagtcacaataaaaccccctaacatgtttgctgacaagtggtacactcaagaggacctgtgtccggtacctcttgtgcaaattgtggtttctgcggcgagcctgctacatccgttctgcccaccacaaacgaacaacccttgcatcaccttccaggttttgaaagacatatatgatgaatgcataggagttaacgaaactatgaaagataagtataagaaattacaaacaacactatacaccacttgcacatactatcaaacaacacaagtactggcacagctatctcctgcctttcaacctgctatgaaacctactactacacaatcagcagctacagcgacaacactaggaaactatgtaccagagttaaagtacaacaatggctcttttcacacaggacaaaacgcagtattcggcatgtgctcatacaaaccaacagacagcataatgacaaaagctaatggctggttttggcaaaacctaatggtagacaacaacctacatagttcttatggcaaggcaacattagaatgcatggagtatcacacaggcatatacagctctatatttctaagtccacaaagatctttagaattcccagcagcataccaagacgttacatacaaccctaactgtgatagagcagttggaaacgtagtttggtttcagtacagcactaaaatggatacaaattttgatgaaacaaaatgtaaatgtgtccttaaaaacattccactgtgggcggccttcaatggctactcagactttataatgcaagaactcagcataagtacagaaatccacaactttggcatagtgtgctttcagtgcccgtacacttttcccccctgtttcaataaaaacaaacccctaaaggggtacgtgttctatgacaccacctttggtaatggaaaaatgccagacggatcggggcacgtacccatctactggcagcagagatggtggatcagactagccttccaggtccaggtcatgcatgactttgtactaacaggcccctttagctacaaagatgacctagcaaacaccacactcacagccagatacaaatttaaattcaaatggggcggcaatatcatccctgaacagattatcaagaacccgtgtcacagagagcagtccctcgcttcctatcccgatagacaacgtcgcgacctacaagttgttgacccatcaaccatgggcccgatctacaccttccacacatgggactggcgacgggggctttttggtgcagatgctatccagagagtgtcacaaaaaccgggagatgctctccgctttacaaaccctttcaagagacccagatatcttcccccgacagacagagaagactaccgacaagaagaagacttcgctttacaggaaaaaagacggcgcacatccacagaagaagcccaggacgaggagagccccccggaaagcgcgccgctcctacagcagcagcagcagcagcggcagctctcagtccacctcgcggagcagcagcgactcggagtccaactccgatacatcctccaagaagtcctcaaaacgcaagcgggtctccacctaaaccccctattattaggcccgccacaaacaaggtctatctctttgagccctccaaaggcctactccccatagtaggaaaagaggcctgggaggacgagtactgcacctgcaagtactgggatcgccctcccagaaccaaccacctagacatccccacttatccctggatgcccacaaacttcaaagtcagcttcaaacttggatttaaaccctaaataaaaatacaaggccgtacactgttcacttgtcggtgtctacctctataagtcactaagcactccgagcgcagcgaggagtgcgaccctcagcggtgggtgcaacgccctcggcggccgcgcgctacgccttcggctgcgcgcggcacctcggacccccgctcgtgctgacacgctcgcgcgtgtcagaccacttcgggctcgcgggggtcgggaattttgctaaacagactccgagttgctcttggacactgtagctgtgaatcagtaacgaaagtgagtggggccagacttcgccataaggcctttatcttcttgccattggtccgtctcgggggtcgccataggcttcgggctcggttttaggccttccggactaccaaaatggcggattccgtgacgtcatggccgccattttaagtaaggcggaacaggctgtcaccccgtgtcaaagttcaggggtcagccttccgctttacacaaaatggaggtcaatatcttccgggtcaaaggtcgctaccgcgtcataagtcacgtggggaaggctgctgtgaatccggaagtagctgacccacgtgacttgtcacgtgactagcacgtcacggcagccattttgaatcacaaaatggccgacttccttcctcttttttaaaaataacggcccggcggcggcgcgcgcgcttcgcgccgctccgccccccccgcgcatgcgcgggacccccccccgcggggggctccgccccccggtcccccccccg

SEQ ID NO: 912 - protein, 129 aa, Alphatorquevirus sp.
MSIWRPPLGNVSYRERNWLQAVETSHSSFCGCGDFILHLTNLAARFALQGPPPEGGPPRPRPPLLRALPAPEVRRETRTENRGASGEPWPGDGGGRDDGAAAGGPADGGDAYDAGDLDDLFAAVEEEQQ

SEQ ID NO: 913 - protein, 283 aa, Alphatorquevirus sp.
MSIWRPPLGNVSYRERNWLQAVETSHSSFCGCGDFILHLTNLAARFALQGPPPEGGPPRPRPPLLRALPAPEVRRETRTENRGASGEPWPGDGGGRDDGAAAGGPADGGDAYDAGDLDDLFAAVEEEQQLSRTRVTESSPSLPIPIDNVATYKLLTHQPWARSTPSTHGTGDGGFLVQMLSRECHKNREMLSALQTLSRDPDIFPRQTEKTTDKKKTSLYRKKDGAHPQKKPRTRRAPRKARRSYSSSSSSGSSQSTSRSSSDSESNSDTSSKKSSKRKRVST

SEQ ID NO: 914 - protein, 305 aa, Alphatorquevirus sp.
MSIWRPPLGNVSYRERNWLQAVETSHSSFCGCGDFILHLTNLAARFALQGPPPEGGPPRPRPPLLRALPAPEVRRETRTENRGASGEPWPGDGGGRDDGAAAGGPADGGDAYDAGDLDDLFAAVEEEQQCYPESVTKTGRCSPLYKPFQETQISSPDRQRRLPTRRRLRFTGKKTAHIHRRSPGRGEPPGKRAAPTAAAAAAAALSPPRGAAATRSPTPIHPPRSPQNASGSPPKPPIIRPATNKVYLFEPSKGLLPIVGKEAWEDEYCTCKYWDRPPRTNHLDIPTYPWMPTNFKVSFKLGFKP

SEQ ID NO: 915 - protein, 55 aa, Alphatorquevirus sp.
MSPTGREIGFRPSKHPTVLFVAVVILFFILLIWLHALLSRGPRQRVVHLGRGRRS

SEQ ID NO: 916 - protein, 766 aa, Alphatorquevirus sp.
MAWRWWWQRRWRRRRWPRRRWRRLRRRRPRRPVRRRRRRTTVRRRRWRGRRGRRTYTRRAVRRRRRPRKRLVLTQWSPQTVRNCSIRGIVPMVICGHTKAGRNYAIHSEDFTTQIQPFGGSFSTTTWSLKVLWDEHQKFQNRWSYPNTQLDLARYRGVTFWFYRDQKTDYIVQWSRNPPFKLNKYSSAMYHPGMMMQAKRKLVVPSFQTRPKGKKRYRVTIKPPNMFADKWYTQEDLCPVPLVQIVVSAASLLHPFCPPQTNNPCITFQVLKDIYDECIGVNETMKDKYKKLQTTLYTTCTYYQTTQVLAQLSPAFQPAMKPTTTQSAATATTLGNYVPELKYNNGSFHTGQNAVFGMCSYKPTDSIMTKANGWFWQNLMVDNNLHSSYGKATLECMEYHTGIYSSIFLSPQRSLEFPAAYQDVTYNPNCDRAVGNVVWFQYSTKMDTNFDETKCKCVLKNIPLWAAFNGYSDFIMQELSISTEIHNFGIVCFQCPYTFPPCFNKNKPLKGYVFYDTTFGNGKMPDGSGHVPIYWQQRWWIRLAFQVQVMHDFVLTGPFSYKDDLANTTLTARYKFKFKWGGNIIPEQIIKNPCHREQSLASYPDRQRRDLQVVDPSTMGPIYTFHTWDWRRGLFGADAIQRVSQKPGDALRFTNPFKRPRYLPPTDREDYRQEEDFALQEKRRRTSTEEAQDEESPPESAPLLQQQQQQRQLSVHLAEQQRLGVQLRYILQEVLKTQAGLHLNPLLLGPPQTRSISLSPPKAYSP

SEQ ID NO: 917 - protein, 219 aa, Alphatorquevirus sp.
MAWRWWWQRRWRRRRWPRRRWRRLRRRRPRRPVRRRRRRTTIIKNPCHREQSLASYPDRQRRDLQVVDPSTMGPIYTFHTWDWRRGLFGADAIQRVSQKPGDALRFTNPFKRPRYLPPTDREDYRQEEDFALQEKRRRTSTEEAQDEESPPESAPLLQQQQQQRQLSVHLAEQQRLGVQLRYILQEVLKTQAGLHLNPLLLGPPQTRSISLSPPKAYSP

SEQ ID NO: 918 - protein, 146 aa, Alphatorquevirus sp.
MAWRWWWQRRWRRRRWPRRRWRRLRRRRPRRPVRRRRRRTTMLSRECHKNREMLSALQTLSRDPDIFPRQTEKTTDKKKTSLYRKKDGAHPQKKPRTRRAPRKARRSYSSSSSSGSSQSTSRSSSDSESNSDTSSKKSSKRKRVST

SEQ ID NO: 919-948 - skipped (30 entries)

SEQ ID NO: 949 - protein, 21 aa, unidentified
  VARIANT 1: note = W or F
  VARIANT 2: note = Any amino acid
  VARIANT 3: note = Any amino acid
  VARIANT 4: note = Any amino acid
  VARIANT 5: note = Any amino acid
  VARIANT 6: note = Any amino acid
  VARIANT 7: note = Any amino acid
  VARIANT 8: note = Any amino acid
  VARIANT 10: note = Any amino acid
  VARIANT 11: note = Any amino acid
  VARIANT 12: note = Any amino acid
  VARIANT 14: note = Any amino acid
  VARIANT 16: note = Any amino acid
  VARIANT 17: note = Any amino acid
  VARIANT 18: note = Any amino acid
  VARIANT 19: note = Any amino acid
  VARIANT 20: note = Any amino acid
XXXXXXXXHXXXCXCXXXXXH

SEQ ID NO: 950-1000 - skipped (51 entries)

SEQ ID NO: 1001 - DNA, 2845 bp, Betatorquevirus sp.
  source 1..2845: mol_type = genomic DNA
ttattaatattcaacaggaaaaccacctaatttaaattgccgaccacaaaccgtcactaacttccttatttaacattacttcccttttaaccaatgaatattcatacaacacatcacacttcctgggaggagacataaaactatataactaactacacagacgaatggctgagtttatgccgctagacggaggacgcacagctactgctgcgacctgaacttgggcgggtgccgaaggtgagtgtaaccaccgtagtcaaggggcaattcgggctagttcagtctagcggaacgggcaagattattaatacaaacttatttttacagatgagcaaacaactaaaaccaactttatacaaagacaaatcattggaattacaatggctaaacaacatttttagctctcacgacctgtgctgcggctgcaacgatccagttttacatttactgattttaattaacaaaaccggagaagcacctaaaccagaagaagacattaaaaatataaaatgcctccttactggcgccaaaaatactaccgaagaagatatagacctttctcctggagaactagaagaattattcaaagaagaaaaagatggagataccgcaaaccaagaaaaacatactggagaagaaaactgcgggtaagaaaacgtttttataaaagaaagttaaaaaaaattgtacttaaacagtttcaaccaaaaattattagaagatgtacaatatttggaacaatctgcctatttcaaggctctccagaaagagccaacaataattatattcaaacaatctactcctacgtaccagataaagaaccaggaggagggggatggactttaataactgaaagcttaagtagtttatgggaagactgggaacatttaaaaaatgtatggactcaaagtaacgctggtttaccacttgtaagatacgggggagtaacattatacttttatcaatctgcctatactgactatattgctcaagttttcaactgttatcctatgacagacacaaaatacacacatgcagactcagcaccaaacagaatgttattaaaaaaacatgtaataagagtacctagcagagaaacacgcaaaaaaagaaagccatacaaaagagttagagtaggacctccttctcaaatgcaaaacaaatggtactttcaaagagacatatgtgaaataccattaataatgattgcagccacagccgttgactttagatatcccttttgtgcaagcgactgtgctagtaacaacttaactctaacatgtttaaacccactattgtttcaaaaccaagactttgaccacccatccgatacacaaggctactttccaaaacctggagtatatctatactcaacacaaagaagtaacaagccaagttcttcagactgtatatacttaggaaacacaaaagacaatcaagaaggtaaatctgcaagtagtctaatgactctaaaaacacaaaaaataacagattggggaaatccattttggcattattatatagacggttctaaaaaaatattttcttactttaaacccccatcacaattagacagcagcgactttgaacacatgacagaattagcagaaccaatgtttatacaagttagatacaacccagaaagagacacaggacaaggaaacttaatatacgtaacagaaaactttagaggacaacactgggaccctccatctagtgacaacctaaaattagatggatttcccttatatgacatgtgctggggtttcatagactggatagaaaaagttcatgaaacagaaaacttacttaccaactactgcttctgtattagaagcagcgctttcaatgaaaaaaaaacagtttttatacctgtagatcattcatttttaacaggttttagcccatatgaaactccagttaaatcatcagaccaagctcactggcacccacaaataagatttcaaacaaaatcaataaatgacatttgtttaacaggccccggttgtgctaggtccccatatggcaattacatgcaggcaaaaatgagttataaatttcatgtaaaatggggaggatgtccaaaaacttatgaaaaaccatatgatccttgttcacagcccaattggactattccccataacctcaatgaaacaatacaaatccagaatccaaacacatgcccacaaacagaactccaagaatgggactggcgacgtgatattgttacaaaaaaagctatcgaaagaattagacaacacacggaacctcatgaaactttgcaaatctctacaggttccaaacacaacccaccagtacacagacaaacatcaccgtggacggactcagaaacggactcggaagaggaaaaagaccaaacacaagagatccagatccagctcaacaagctcagaaagcatcaacagcatctcaagcagcagctcaagcagtacctgaaaccccaaaatatagaatagttgcaagcaacataaaagttgaactttttcctactaaaaaaccttttaaaaacagacgctttactccttctgaaagagaaacagaaagacaatgtgctaaagctttttgtagaccagaaagacatttcttttatgatcctcctttttacccttactgtgtacctgaacctattgtaaactttgctttgggatataaaatttaaggccaacaaatttcacttagtggtgtctgtttattaaagtttaaccttaataagcatactccgcctccctacattaaggcgccaaaagggggctccgcccccttaaaccccaagggggctccgcccccttaaacccccaagggggctccgcccccttacaccccc

SEQ ID NO: 1002 - protein, 107 aa, Betatorquevirus sp.
MSKQLKPTLYKDKSLELQWLNNIFSSHDLCCGCNDPVLHLLILINKTGEAPKPEEDIKNIKCLLTGAKNTTEEDIDLSPGELEELFKEEKDGDTANQEKHTGEENCG

SEQ ID NO: 1003 - protein, 218 aa, Betatorquevirus sp.
MSKQLKPTLYKDKSLELQWLNNIFSSHDLCCGCNDPVLHLLILINKTGEAPKPEEDIKNIKCLLTGAKNTTEEDIDLSPGELEELFKEEKDGDTANQEKHTGEENCGPIGLFPITSMKQYKSRIQTHAHKQNSKNGTGDVILLQKKLSKELDNTRNLMKLCKSLQVPNTTHQYTDKHHRGRTQKRTRKRKKTKHKRSRSSSTSSESINSISSSSSSST

SEQ ID NO: 1004 - protein, 234 aa, Betatorquevirus sp.
MSKQLKPTLYKDKSLELQWLNNIFSSHDLCCGCNDPVLHLLILINKTGEAPKPEEDIKNIKCLLTGAKNTTEEDIDLSPGELEELFKEEKDGDTANQEKHTGEENCGFQTQPTSTQTNITVDGLRNGLGRGKRPNTRDPDPAQQAQKASTASQAAAQAVPETPKYRIVASNIKVELFPTKKPFKNRRFTPSERETERQCAKAFCRPERHFFYDPPFYPYCVPEPIVNFALGYKI

SEQ ID NO: 1005 - protein, 655 aa, Betatorquevirus sp.
MPPYWRQKYYRRRYRPFSWRTRRIIQRRKRWRYRKPRKTYWRRKLRVRKRFYKRKLKKIVLKQFQPKIIRRCTIFGTICLFQGSPERANNNYIQTIYSYVPDKEPGGGGWTLITESLSSLWEDWEHLKNVWTQSNAGLPLVRYGGVTLYFYQSAYTDYIAQVFNCYPMTDTKYTHADSAPNRMLLKKHVIRVPSRETRKKRKPYKRVRVGPPSQMQNKWYFQRDICEIPLIMIAATAVDFRYPFCASDCASNNLTLTCLNPLLFQNQDFDHPSDTQGYFPKPGVYLYSTQRSNKPSSSDCIYLGNTKDNQEGKSASSLMTLKTQKITDWGNPFWHYYIDGSKKIFSYFKPPSQLDSSDFEHMTELAEPMFIQVRYNPERDTGQGNLIYVTENFRGQHWDPPSSDNLKLDGFPLYDMCWGFIDWIEKVHETENLLTNYCFCIRSSAFNEKKTVFIPVDHSFLTGFSPYETPVKSSDQAHWHPQIRFQTKSINDICLTGPGCARSPYGNYMQAKMSYKFHVKWGGCPKTYEKPYDPCSQPNWTIPHNLNETIQIQNPNTCPQTELQEWDWRRDIVTKKAIERIRQHTEPHETLQISTGSKHNPPVHRQTSPWTDSETDSEEEKDQTQEIQIQLNKLRKHQQHLKQQLKQYLKPQNIE

SEQ ID NO: 1006 - protein, 164 aa, Betatorquevirus sp.
MPPYWRQKYYRRRYRPFSWRTRRIIQRRKRWRYRKPRKTYWRRKLRPNWTIPHNLNETIQIQNPNTCPQTELQEWDWRRDIVTKKAIERIRQHTEPHETLQISTGSKHNPPVHRQTSPWTDSETDSEEEKDQTQEIQIQLNKLRKHQQHLKQQLKQYLKPQNIE

SEQ ID NO: 1007 - protein, 99 aa, Betatorquevirus sp.
MPPYWRQKYYRRRYRPFSWRTRRIIQRRKRWRYRKPRKTYWRRKLRVPNTTHQYTDKHHRGRTQKRTRKRKKTKHKRSRSSSTSSESINSISSSSSSST

SEQ ID NO: 1008 - DNA, 2912 bp, Betatorquevirus sp.
  source 1..2912: mol_type = genomic DNA
taataaatattcaacaggaaaaccacctaatttaaattgccgaccacaaaccgtcacttagttcctctttttccacaacttcctcttttactaatgaatattcatgtaattaattaataatcaccgtaattccggggaggagcctttaaactataaaactaactacacattcgaatggctgagtttatgccgccagacggagacgggatcacttcagtgactccaggctgatcaagggcgggtgccgaaggtgagtgaaaccaccgtagtcaaggggcaattcgggctagatcagtctggcggaacgggcaagaaacttaaaatgtactttattttacagaaatgttcaaatctccaacatacttaacaactaaaggcaaaaacaatgccttaatcaactgcttcgttggagaccacgatcttctgtgcagctgtaacaatcctgcctaccattgcctccaaatacttgcaactaccttagcacctcaactaaaacaagaagaaaaacaacaaataatacaatgccttggtggtacagacgccgtagctacaacccgtggagacgaagaaattggtttagaagacctagaaaaactatttacagaagatacagaagaagacgccgctgggtaagaagaaaacctttttacaaacgtaaaattaagagactaaatatagtagaatggcaacctaaatcaattagaaaatgtagaataaaaggaatgctatgcttgtttcaaacgacagaagacagactgtcatataactttgatatgtatgaagagtctattataccagaaaaactgccgggaggggggggatttagcattaagaatataagcttatatgccttataccaagaacacatacatgcacacaacatatttacacacacaaacacagacagaccactagcaagatacacaggctgttctttaaaattctaccaaagcaaagacatagactacgtagtaacatattctacatcactcccactaagaagctcaatgggaatgtacaactccatgcaaccatccatacatctaatgcaacaaaacaaactaattgtaccaagcaaacaaacacaaaaaagaagaaaaccatatattaaaaaacatatatcaccaccaacacaaatgaaatctcaatggtactttcaacataacattgcaaacataccgctactaatgataagaaccacagcattaacattagataattactatataggaagcagacaattaagtacaaatgtcactatacatacacttaacacaacatacatccaaaacagagactggggagacagaaataaaacttactactgccaaacattaggaacacaaagatacttcctatatggaacacattcaactgcacaaaatattaatgacataaagctacaagaactaatacctttaacaaacacacaagactatgtacaaggctttgattggacagaaaaagacaaacataacataacaacctacaaagaattcttaactaaaggagcaggaaatccatttcacgcagaatggataacagcacaaaacccagtaatacacacagcaaacagtcctacacaaatagaacaaatatacaccgcttcaacaacaacattccaaaacaaaaaactaacagacctaccaacgccaggatatatatttataactccaacagtaagcttaagatacaacccatacaaagacctagcagaaagaaacaaatgctactttgtaagaagcaaaataaatgcacacgggtgggacccagaacaacaccaagaattaataaacagtgacctaccacaatggttactattatttggctacccagactacataaaaagaacacaaaactttgcattagtagacacaaattacatactagtagaccactgcccatacacaaatccagaaaaaacaccatttatacctttaagcacatcatttatagaaggtagaagcccatacagtccttcagacacacatgaaccagatgaagaagaccaaaacaggtggtacccatgctaccaatatcaacaagaatcaataaattcaatatgtcttagcggtccaggcacaccaaaaataccaaaaggaataacagcagaagcaaaagtaaaatattcctttaattttaagtggggtggtgacctaccaccaatgtctacaattacaaacccgacagaccagccaacatatgttgttcccaataacttcaatgaaacaacttcgttacagaatccaaccaccagaccagagcacttcttgtactcctttgacgaaaggaggggacaacttacagaaaaagctacaaaacgcttgcttaaagactgggaaactaaagaaacttctttattgtctacagaatacagattcgcggagccaacacaaacacaagccccacaagaggacccgtcctcggaagaagaagaagagagcaacctcttcgagcgactcctccgacagcgaaccaagcagctccagctcaagcgcagaataatacaaacattgaaagacctacaaaaattagaataactaacagcaaaaacaccgtttacctatttccacctgaacaaaagaacagaagactaacaccatgggaaatacaagaagacaaagaaatagccaatttatttggcagaccacatagatactttttaaaagacattcctttctattgggatatacccccagagcctaaagtaaactttgatttaaattttcaataaagaaataaagggcaaggccccattaactcaaagtcggtgtctacctctttaagtttaactttactaaacggactccgcctccctaaatttgggcgccaaaagggggctccgcccccttaaaccccagggggctccgccccctaaaacccccaagggggctacgcccccttacaccccc

SEQ ID NO: 1009 - protein, 96 aa, Betatorquevirus sp.
MFKSPTYLTTKGKNNALINCFVGDHDLLCSCNNPAYHCLQILATTLAPQLKQEEKQQIIQCLGGTDAVATTRGDEEIGLEDLEKLFTEDTEEDAAG

SEQ ID NO: 1010 - protein, 198 aa, Betatorquevirus sp.
MFKSPTYLTTKGKNNALINCFVGDHDLLCSCNNPAYHCLQILATTLAPQLKQEEKQQIIQCLGGTDAVATTRGDEEIGLEDLEKLFTEDTEEDAAGQHMLFPITSMKQLRYRIQPPDQSTSCTPLTKGGDNLQKKLQNACLKTGKLKKLLYCLQNTDSRSQHKHKPHKRTRPRKKKKRATSSSDSSDSEPSSSSSSAE

SEQ ID NO: 1011 - protein, 216 aa, Betatorquevirus sp.
MFKSPTYLTTKGKNNALINCFVGDHDLLCSCNNPAYHCLQILATTLAPQLKQEEKQQIIQCLGGTDAVATTRGDEEIGLEDLEKLFTEDTEEDAAGIQIRGANTNTSPTRGPVLGRRRREQPLRATPPTANQAAPAQAQNNTNIERPTKIRITNSKNTVYLFPPEQKNRRLTPWEIQEDKEIANLFGRPHRYFLKDIPFYWDIPPEPKVNFDLNFQ

SEQ ID NO: 1012 - protein, 672 aa, Betatorquevirus sp.
MPWWYRRRSYNPWRRRNWFRRPRKTIYRRYRRRRRWVRRKPFYKRKIKRLNIVEWQPKSIRKCRIKGMLCLFQTTEDRLSYNFDMYEESIIPEKLPGGGGFSIKNISLYALYQEHIHAHNIFTHTNTDRPLARYTGCSLKFYQSKDIDYVVTYSTSLPLRSSMGMYNSMQPSIHLMQQNKLIVPSKQTQKRRKPYIKKHISPPTQMKSQWYFQHNIANIPLLMIRTTALTLDNYYIGSRQLSTNVTIHTLNTTYIQNRDWGDRNKTYYCQTLGTQRYFLYGTHSTAQNINDIKLQELIPLTNTQDYVQGFDWTEKDKHNITTYKEFLTKGAGNPFHAEWITAQNPVIHTANSPTQIEQIYTASTTTFQNKKLTDLPTPGYIFITPTVSLRYNPYKDLAERNKCYFVRSKINAHGWDPEQHQELINSDLPQWLLLFGYPDYIKRTQNFALVDTNYILVDHCPYTNPEKTPFIPLSTSFIEGRSPYSPSDTHEPDEEDQNRWYPCYQYQQESINSICLSGPGTPKIPKGITAEAKVKYSFNFKWGGDLPPMSTITNPTDQPTYVVPNNFNETTSLQNPTTRPEHFLYSFDERRGQLTEKATKRLLKDWETKETSLLSTEYRFAEPTQTQAPQEDPSSEEEEESNLFERLLRQRTKQLQLKRRIIQTLKDLQKLE

SEQ ID NO: 1013 - protein, 80 aa, Betatorquevirus sp.
MPWWYRRRSYNPWRRRNWFRRPRKTIYRRYRRRRRWNTDSRSQHKHKPHKRTRPRKKKKRATSSSDSSDSEPSSSSSSAE

SEQ ID NO: 1014 - DNA, 3853 bp, Alphatorquevirus sp.
  source 1..3853: mol_type = genomic DNA
ggcttagtgcgtcaccacccacgtgacccgcctccgccaattaacaggtacttcgtacacttcctgggcgggcttataagactaatataagtagctgcacttccgaatggctgagttttccacgcccgtccgcagcggtgaagccacggagggagctcagcgcgtcccgagggcgggtgccggaggtgagtttacacaccgcagtcaaggggcaattcgggctcgggactggccgggctttgggcaaggctcttaaaaaagctatgtttattggcaggcactaccgaaagaaaagggcgctgctactgctatctgtgcattctacaaagacaaaagggaaacttctaatagctatgtggactcccccacgcaatgatcaacaataccttaactggcaatggtacacttctgtacttagctcccactctgctatgtgcgggtgttccgacgctatcgctcatcttaatcatcttgctaatctgcttcgtgccccgcaaaatccgcccccgcctgataatccaagacccctacccgtgcgagcactgcctgctcccccggctgcccacgaggcagccggtgatcgagcaccatggcctatgggtggtggaggagacgccggaggcgctggcgcaggtggagacgccgaccatggaggcgccgctggaggacccgcagacgcagacctgctagacgccgtggccgccgcagaaacgtaaggagacggcgcagagggaggtggagaaggaggtacaggaggtggaaaagaaagggcagacgtagaagaaaagcaaaaataataataagacagtggcagccaaactacagaagaagatgtaatatagtgggctacctccctatacttatctgtggtggaaatactgtttctagaaactatgccacacactcagacgatactaactatccaggaccctttgggggaggcatgaccacagacaaattcagccttagaatactatatgatgaatacaaaagatttatgaactactggacagcctcaaatgaggacctagatctctgtagatatctaggatgcactttttacttctttagacaccctgaagtagactttattataaaaataaacaccatgcccccattcttagatacaaccataacagcacctagcatacacccaggcctcatggccctagacaaaagagccagatggattccttctcttaaaaatagaccaggtaaaaaacactatataaaaattagagtaggggctcctaaaatgttcacagataaatggtaccctcaaacagacctctgtgacatgacactgctaactatctatgcaaccgcagcggatatgcaatatccgttcggctcaccactaactgacactgtggttgttaactcccaagttctgcaatccatgtatgatgaaacaattagcatattacctgatgaaaaaactaaaagaaatagccttcttacttctataagaagctacatacctttttataatactacacaaacaatagctcaattaaaaccatttgtagatgcaggaggacacacaacaggctcaacaacaactacatggggacaactattaaacacaactaaatttaccactaccacaacaaccacatacacataccctggcaccacaaatacagcagtaacatttataacagccaatgatacctggtacaggggaacagcatataaagataacattaaagatgtaccacaaaaagcagcacaattatactttcaaacaacacaaaaactactaggaaacacattccatggctcagatgaaacacttgaataccatgcaggcctatacagctctatctggctatcaccaggtagatcctactttgaaacaccaggtgcatacacagacattaaatataacccttttacagacagaggagaaggcaacatgctgtggatagactggctaagtaaaaaaaacatgaaatatgacaaagtgcaaagtaagtgcctagtagcagacctaccactgtgggcagcagcatatggttatgtagaattctgctctaaaagcacaggagacacaaacatacacatgaatgccagactactaataagaagtccttttacagacccccagctaatagtacacacagaccccactaaaggctttgtaccctattctttaaactttggaaatggtaaaatgccaggaggtagcagcaatgttcccataagaatgagagctaagtggtaccccactttatcccaccaacaagaagttctagaggccttagcacagtcaggaccctttgcttatcactcagacattaaaaaagtatctctaggcataaaataccgttttaagtggatctggggtggaaaccccgttcgccaacaggttgttagaaatccctgcaaggaaccccactcctcgggcaatagagtccctagaagcatacaaatcgttgacccgagatacaactcaccggaacttaccatccatgcctgggacttcagacgtggcttctttggcccgaaagctattcaaagaatgcaacaacaaccaactgctactgaatttttttcagcaggccgcaagagacccagaagggacacagaagtgtatcagtccgaccaagaaaaggagcaaaaagaaagctcgcttttccccccagtcaagctcctccgaagagtccccccgtgggaggactcggaacaggagcaaagcgggtcgcaaagctcagaggaagagacggcgaccctctcccagcagctcaaacagcagctgcagcagcagcgagtcttgggagtcaaactcagactcctgttcaaccaagtccaaaaaatccaacaaaatcaagatatcaaccctaccttgttaccaagggggggggatctagtatccttctttcaggctgtaccataaatatgtttccagaccctaaaccttactgcccctccagcaatgactggaaagaagagtatgaggcctgtaaatattgggatagacctcccagacacaaccttagagacccccccttttacccctgggcccctaaaaacaatccttgcaatgtaagctttaaacttggcttcaaataaactaggccgtgggagtttcacttgtcggtgtctacctctataagtcactaagcactccgagcgcagcgaggagtgcgacccttccccctggtgcaacgccctcggcggccgcgcgctacgccttcggctgcgcgcggcacctcggacccccgctcgtgctgacacgcttgcgcgtgtcagaccacttcgggctcgcgggggtcgggaaatttgctaaacagactccgagttgccattggacactgtagctatgaatcagtaacgaaagtgagtggggccagacttcgccataaggcctttatcttcttgccatttgtcagtattgggggtcgccataaactttgggctccattttaggccttccggactacaaaaatcgccatatttgtgacgtcagagccgccattttaagtcagctctggggaggcgtgacttccagttcaaaggtcatcctcaccataactggcacaaaatggccgccaacttcttccgggtcaaaggtcactgctacgtcataggtgacgtggggggggacctacttaaacacggaagtaggccccgacacgtcactgtcacgtgacagtacgtcacagccgccattttgttttacaaaatagccgacttccttcctcttttttaaaaaaaggcgccaaaaaaccgtcggcgggggggccgcgcgctgcgcgcgcggcccccgggggaggcacagcctcccccccccgcgcgcatgcgcgcgggtccccccccctccggggggctccgccccccggcccccccc

SEQ ID NO: 1015 - protein, 120 aa, Alphatorquevirus sp.
MWTPPRNDQQYLNWQWYTSVLSSHSAMCGCSDAIAHLNHLANLLRAPQNPPPPDNPRPLPVRALPAPPAAHEAAGDRAPWPMGGGGDAGGAGAGGDADHGGAAGGPADADLLDAVAAAET

SEQ ID NO: 1016 - protein, 286 aa, Alphatorquevirus sp.
MWTPPRNDQQYLNWQWYTSVLSSHSAMCGCSDAIAHLNHLANLLRAPQNPPPPDNPRPLPVRALPAPPAAHEAAGDRAPWPMGGGGDAGGAGAGGDADHGGAAGGPADADLLDAVAAAETLLEIPARNPTPRAIESLEAYKSLTRDTTHRNLPSMPGTSDVASLARKLFKECNNNQLLLNFFQQAARDPEGTQKCISPTKKRSKKKARFSPQSSSSEESPRGRTRNRSKAGRKAQRKRRRPSPSSSNSSCSSSESWESNSDSCSTKSKKSNKIKISTLPCYQGGGI

SEQ ID NO: 1017 - protein, 289 aa, Alphatorquevirus sp.
MWTPPRNDQQYLNWQWYTSVLSSHSAMCGCSDAIAHLNHLANLLRAPQNPPPPDNPRPLPVRALPAPPAAHEAAGDRAPWPMGGGGDAGGAGAGGDADHGGAAGGPADADLLDAVAAAETPQETQKGHRSVSVRPRKGAKRKLAFPPSQAPPKSPPVGGLGTGAKRVAKLRGRDGDPLPAAQTAAAAAASLGSQTQTPVQPSPKNPTKSRYQPYLVTKGGGSSILLSGCTINMFPDPKPYCPSSNDWKEEYEACKYWDRPPRHNLRDPPFYPWAPKNNPCNVSFKLGFK

SEQ ID NO: 1018 - protein, 185 aa, Alphatorquevirus sp.
MWTPPRNDQQYLNWQWPQETQKGHRSVSVRPRKGAKRKLAFPPSQAPPKSPPVGGLGTGAKRVAKLRGRDGDPLPAAQTAAAAAASLGSQTQTPVQPSPKNPTKSRYQPYLVTKGGGSSILLSGCTINMFPDPKPYCPSSNDWKEEYEACKYWDRPPRHNLRDPPFYPWAPKNNPCNVSFKLGFK

SEQ ID NO: 1019 - protein, 105 aa, Alphatorquevirus sp.
MINNTLTGNGTLLYLAPTLLCAGVPTLSLILIILLICFVPRKIRPRLIIQDPYPCEHCLLPRLPTRQPVIEHHGLWVVEETPEALAQVETPTMEAPLEDPQTQTC

SEQ ID NO: 1020 - protein, 769 aa, unidentified
MAYGWWRRRRRRWRRWRRRPWRRRWRTRRRRPARRRGRRRNVRRRRRGRWRRRYRRWKRKGRRRRKAKIIIRQWQPNYRRRCNIVGYLPILICGGNTVSRNYATHSDDTNYPGPFGGGMTTDKFSLRILYDEYKRFMNYWTASNEDLDLCRYLGCTFYFFRHPEVDFIIKINTMPPFLDTTITAPSIHPGLMALDKRARWIPSLKNRPGKKHYIKIRVGAPKMFTDKWYPQTDLCDMTLLTIYATAADMQYPFGSPLTDTVVVNSQVLQSMYDETISILPDEKTKRNSLLTSIRSYIPFYNTTQTIAQLKPFVDAGGHTTGSTTTTWGQLLNTTKFTTTTTTTYTYPGTTNTAVTFITANDTWYRGTAYKDNIKDVPQKAAQLYFQTTQKLLGNTFHGSDETLEYHAGLYSSIWLSPGRSYFETPGAYTDIKYNPFTDRGEGNMLWIDWLSKKNMKYDKVQSKCLVADLPLWAAAYGYVEFCSKSTGDTNIHMNARLLIRSPFTDPQLIVHTDPTKGFVPYSLNFGNGKMPGGSSNVPIRMRAKWYPTLSHQQEVLEALAQSGPFAYHSDIKKVSLGIKYRFKWIWGGNPVRQQVVRNPCKEPHSSGNRVPRSIQIVDPRYNSPELTIHAWDFRRGFFGPKAIQRMQQQPTATEFFSAGRKRPRRDTEVYQSDQEKEQKESSLFPPVKLLRRVPPWEDSEQEQSGSQSSEEETATLSQQLKQQLQQQRVLGVKLRLLFNQVQKIQQNQDINPTLLPRGGDLVSFFQAVP

SEQ ID NO: 1021 - protein, 216 aa, Alphatorquevirus sp.
MAYGWWRRRRRRWRRWRRRPWRRRWRTRRRRPARRRGRRRNVVRNPCKEPHSSGNRVPRSIQIVDPRYNSPELTIHAWDFRRGFFGPKAIQRMQQQPTATEFFSAGRKRPRRDTEVYQSDQEKEQKESSLFPPVKLLRRVPPWEDSEQEQSGSQSSEEETATLSQQLKQQLQQQRVLGVKLRLLFNQVQKIQQNQDINPTLLPRGGDLVSFFQAVP

SEQ ID NO: 1022 - protein, 143 aa, Alphatorquevirus sp.
MAYGWWRRRRRRWRRWRRRPWRRRWRTRRRRPARRRGRRRNAARDPEGTQKCISPTKKRSKKKARFSPQSSSSEESPRGRTRNRSKAGRKAQRKRRRPSPSSSNSSCSSSESWESNSDSCSTKSKKSNKIKISTLPCYQGGGI

SEQ ID NO: 1023 - DNA, 2876 bp, Betatorquevirus sp.
  source 1..2876: mol_type = genomic DNA
cgggagccgaaggtgagtgcaaccaccgtagtctaggggcaattcgggctagttcagtatggcggaacgggcaagaaacttaaatattattattttacagatgcaaatacaaccacctattagaaccttcaaacaaacaatttcagattggaaaaacttaattgtccacgttcacgacaacatttgcaactgcaataaaccattagaacacactattgatacctgtatcaccaatccagatgaattaagattaaacaaatctactaaacaacaactacaaaaatgccttggtaccccagaagaagatacccaagaagacgttatcgatggcttcgcagatggagagctagacgcccttttcgcccaagatacagaagaagatactgggtaagaaactattctcgaaagagaaaactatttaaaataacaaccaaagaatggcaaccaaaagttataagaaagactcatgtaaagggcacctatcctttgtttctttgtacaaagcacagaattaacaataatatgatacaatatttagactctatagctccagaacactattacggaggaggaggattttcaataatgcaattttccttacaagccttatatgaagaatttataaaagcaaaaaactggtggactaatacaaactgctttttaccacttgtaagatatatgggttgctcattcaaattttataaaactgaattttatgattatattgtactaattgaaagatgttatccacttgcttgtactgatgaaatgtacttatctactcaacctagtattatgatgcttacaagaaaatgtatttttgtaccatgcaaacaaaacagcaaaggtaaaaaaccttacaaaaaagttagagtaagaccaccttcacaaatgactacaggatggcatttctcacaagacttagcaaacatgccacttgtagtactaaaaacttcagtatgcagctttgacagatattacacagacagtacagctaaatcaaccacaataggctttaaaacacttaacacacaaacatttagatatcatgactggcaggaaccacctacaacaggatacaaaccacaaaacctactatggttttatggagcagaaaacggatcaccagtagaccccaacaacacaatagtatcaaacctaatatacttaggaggcacaggaccttatgaaaaaggcacaccaataaaaacaaacataagcaattacttttcagagcctaaactgtggggaaatatatttcacgatgattatacatcaggaacatcacccgtgtttgttacaaacaaatcaccatcagaaattaaaaccgcatggaacactataaaagacttaactgttaaagctagcggtgtatttacattaagaacaattccactatggctaccttgcagatacaacccatttgcagacaaagcaaccaacaacaaaatatggctagtttctatacattcagaccacacagaatggaaaccaatagacaatccattactacaacgaacagaccttcctttatggttacttgtatggggttggcaagattggcagaaaaaaaaccaacaaacttcacaacctgatattaattatttaacagtaatatcttcaccatatatatcatgctacccaaaattagattactatgtgttactagatgaaggattttgggagggtcactcaacatacatagagtcaattacagactcagacaaaaaacactggtaccctaaaaatagatttcaaatagaaacacttaatctaatagctaacacaggtccaggaactgtaaaactaagagaaaaccaagcagcagaaggtcacatggtatatcgctttaattttaagcttggaggatgtcccgcaccgatggaaaaaatatgtgaccctagcaaacaatccaaatatcctattcccaataaccagcaacaaacaacttcgttgcagagtccagaaaacccaattcaaacctatctctacgacttcgacgaaaggaggggcctacttacagaaagagctacaaaaagaatcaaacaagatcacacatctgaaaaaactgttttgccatttacaggagcagcaacagacctccccatactccaaacaacatcacaggaggaaagctcctcggaagaagaagaagagcaacaagcggagaagaaactactccagctccgaagaaagcagcaccgactccgggagcgaatcctccagctattagacatacaaaatacataataaaacaaagtactgtaaaaattgatatgtttggagatactcatgtacctaaccgtagaatgaccccagaagaatttgaacaagaactaattgtcgctggtgtttttcgcagacctccttgttactatataaaagatagacctacttatccttatgtaccaaaacctactgatgaaaaatgtatggtaaactttgacttaaactttccttaataaactacgcctgcaaactttcactctcggtgtccatttatataagataaaacttaaataaacatccaccactctcccaaatacgcaggcgcacaagggggctccgcccccttaaacccccaagggggctccgcccccttaaacccccaagggggctccgcccccttacaccccctaataaatattcaacaggaaaaccacctaattagaattgccgaccacaaaccgtcacttacttctcctttttgcacttacttcctcttttacttattattattcattacattaattaataatcactgtaattccggggaggagctaacaatctatataactaactacacttccgaatggctgagtttatgccgccagacggagacgggatcacttcagtgactccaggctgaacttggg

SEQ ID NO: 1024 - protein, 655 aa, Betatorquevirus sp.
MPWYPRRRYPRRRYRWLRRWRARRPFRPRYRRRYWVRNYSRKRKLFKITTKEWQPKVIRKTHVKGTYPLFLCTKHRINNNMIQYLDSIAPEHYYGGGGFSIMQFSLQALYEEFIKAKNWWTNTNCFLPLVRYMGCSFKFYKTEFYDYIVLIERCYPLACTDEMYLSTQPSIMMLTRKCIFVPCKQNSKGKKPYKKVRVRPPSQMTTGWHFSQDLANMPLVVLKTSVCSFDRYYTDSTAKSTTIGFKTLNTQTFRYHDWQEPPTTGYKPQNLLWFYGAENGSPVDPNNTIVSNLIYLGGTGPYEKGTPIKTNISNYFSEPKLWGNIFHDDYTSGTSPVFVTNKSPSEIKTAWNTIKDLTVKASGVFTLRTIPLWLPCRYNPFADKATNNKIWLVSIHSDHTEWKPIDNPLLQRTDLPLWLLVWGWQDWQKKNQQTSQPDINYLTVISSPYISCYPKLDYYVLLDEGFWEGHSTYIESITDSDKKHWYPKNRFQIETLNLIANTGPGTVKLRENQAAEGHMVYRFNFKLGGCPAPMEKICDPSKQSKYPIPNNQQQTTSLQSPENPIQTYLYDFDERRGLLTERATKRIKQDHTSEKTVLPFTGAATDLPILQTTSQEESSSEEEEEQQAEKKLLQLRRKQHRLRERILQLLDIQNT

SEQ ID NO: 1025 - protein, 110 aa, Betatorquevirus sp.
MAERARNLNIIILQMQIQPPIRTFKQTISDWKNLIVHVHDNICNCNKPLEHTIDTCITNPDELRLNKSTKQQLQKCLGTPEEDTQEDVIDGFADGELDALFAQDTEEDTG

SEQ ID NO: 1026 - protein, 61 aa, Betatorquevirus sp.
MFGDTHVPNRRMTPEEFEQELIVAGVFRRPPCYYIKDRPTYPYVPKPTDEKCMVNFDLNFP

SEQ ID NO: 1027 - DNA, 2876 bp, Betatorquevirus sp.; identical to SEQ ID NO: 1023
  source 1..2876: mol_type = genomic DNA

SEQ ID NO: 1028 - protein, 655 aa, Betatorquevirus sp.; identical to SEQ ID NO: 1024

SEQ ID NO: 1029 - protein, 96 aa, Betatorquevirus sp.
MQIQPPIRTFKQTISDWKNLIVHVHDNICNCNKPLEHTIDTCITNPDELRLNKSTKQQLQKCLGTPEEDTQEDVIDGFADGELDALFAQDTEEDTG

SEQ ID NO: 1030 - protein, 61 aa, Betatorquevirus sp.; identical to SEQ ID NO: 1026

SEQ ID NO: 1031-1099 - skipped (69 entries)

SEQ ID NO: 1100 - protein, 736 aa, Alphatorquevirus sp.
MAWGFWGRRRRWRRWRPRRRRWRPRRRRRRRPARRFRARRRVRRRGGRWRRRYRKWRRGRRRRTHRKKIVIKQWQPNFIRRCYIIGYLPLIFCGENTTAQNYATHSDDMISKGPYGGGMTTTKFTLRILYDEFTRFMNFWTVSNEDLDLCRYVGCKLIFFKHPTVDFIVQINTQPPFLDTHLTAASIHPGIMMLSKRRILIPSLKTRPSRKHRVVVRVGAPRLFQDKWYPQSDLCDTVLLSIFATACDLQYPFGSPLTDNPCVNFQILGPQYKKHLSISSTMDTTNKQHYDSNLFNQTQLYNTFQTIAQLKETGQTANISPSWSAVQNNMALSNTGENATQSKDTWYKGNTYNNHITTLAQKTRERFKGATKAALQNYPTIMSTDLYEYHSGIYSSIFLSAGRSYFETTGAYSDIIYNPFTDKGTGNIIWIDYLTKEDTIFVKNKSKCEIMDMPLWAACTGYTEFCAKYTGDSAIIYNARVLIRCPYTEPMLIDHSDPNKGFVPYSFNFGNGKMPGGSSNVPIRMRAKWYVNIFHQKEVLETIVQSGPFGYKGDIKSAVLAMKYRFHWKWGGNPISKQVVRNPCSNSSSSAAHRGPRSVQAVDPKYNTPEVTWHSWDIRRGLFGKAGIKRMQQESDALYIPPGPFKRPRRDTNAQDPEEQNESSGFRVQQRLPWVHSSQETQSSQEETEAQGSVQDQLLLQLREQRVLRLQLQQLATQVLKVQAGHGIHPLLSSQA

SEQ ID NO: 1101-1999 - skipped (899 entries)

SEQ ID NO: 2000 - DNA, 9391 bp, synthetic construct
  source 1..9391: mol_type = other DNA
tcgcgcgtttcggtgatgacggtgaaaacctctgacacatgcagctcccggagacggtcacagcttgtctgtaagcggatgccgggagcagacaagcccgtcagggcgcgtcagcgggtgttggcgggtgtcggggctggcttaactatgcggcatcagagcagattgtactgagagtgcaccatatgcggtgtgaaataccgcacagatgcgtaaggagaaaataccgcatcaggcgccattcgccattcaggctgcgcaactgttgggaagggcgatcggtgcgggcctcttcgctattacgccagctggcgaaagggggatgtgctgcaaggcgattaagttgggtaacgccagggttttcccagtcacgacgttgtaaaacgacggccagagaattcgagctcggtacctcgcgaatacatctagatatggttggctccggtgcccgtcagtgggcagagcgcacatcgcccacagtccccgagaagttgtggggaggggtcggcaattgaaccggtgcctagagaaggtggcgcggggtaaactgggaaagtgatgtcgtgtactggctccgcctttttcccgagggtgggggagaaccgtatataagtgcagtagtcgccgtgaacgttctttttcgcaacgggtttgccgccagaacacaggtaagtgccgtgtgtggttcccgcgggcctggcctctttacgggttatggcccttgcgtgccttgaattacttccacctggctgcagtacgtgattcttgatcccgagcttcgggttggaagtgggtgggagagttcgaggccttgcgcttaaggagccccttcgcctcgtgcttgagttgaggcctggcctgggcgctggggccaccgcgtgcgaatctggtggcaccttcgcgcctgtctcgctgctttcgataagtctctagccatttaaaatttttgatgacctgctgcgacgctttttttctggcaagatagtcttgtaaatgcgggccaagatctgcacactggtatttcggtttttggggccgcgggcggcgacggggcccgtgcgtcccagcgcacatgttcggcgaggcggggcctgcgagcgcggccaccgagaatcggacgggggtagtctcaagctggccggcctgctctggtgcctggcctcgcgccgccgtgtatcgccccgccctgggcggcaaggctggcccggtcggcaccagttgcgtgagcggaaagatggccgcttcccggccctgctgcagggagctcaaaatggaggacgcggcgctcgggagagcgggcgggtgagtcacccacacaaaggaaaagggcctttccgtcctcagccgtcgcttcatgtgactccacggagtaccgggcgccgtccaggcacctcgattagttctcgagcttttggagtacgtcgtctttaggttggggggaggggttttatgcgatggagtttccccacactgagtgggtggagactgaagttaggccagcttggcacttgatgtaattctccttggaatttgccctttttgagtttggatcttggttcattctcaagcctcagacagtggttcaaagtttttttcttccatttcaggtggatgtttatgccgccagacggagacgggatcacttcagtgactccaggctgaacttgggcgggagccgaaggtgagtgcaaccaccgtagtctaggggcaattcgggctagttcagtatggcggaacgggcaagaaacttaaatattattattttacagatgcaaatacaaccacctattagaaccttcaaacaaacaatttcagattggaaaaacttaattgtccacgttcacgacaacatttgcaactgcaataaaccattagaacacactattgatacctgtatcaccaatccagatgaattaagattaaacaaatctactaaacaacaactacaaaaatgccttggtaccccagaagaagatacccaagaagacgttatcgatggcttcgcagatggagagctagacgcccttttcgcccaagatacagaagaagatactgggtaagaaactattctcgaaagagaaaactatttaaaataacaaccaaagaatggcaaccaaaagttataagaaagactcatgtaaagggcacctatcctttgtttctttgtacaaagcacagaattaacaataatatgatacaatatttagactctatagctccagaacactattacggaggaggaggattttcaataatgcaattttccttacaagccttatatgaagaatttataaaagcaaaaaactggtggactaatacaaactgctttttaccacttgtaagatatatgggttgctcattcaaattttataaaactgaattttatgattatattgtactaattgaaagatgttatccacttgcttgtactgatgaaatgtacttatctactcaacctagtattatgatgcttacaagaaaatgtatttttgtaccatgcaaacaaaacagcaaaggtaaaaaaccttacaaaaaagttagagtaagaccaccttcacaaatgactacaggatggcatttctcacaagacttagcaaacatgccacttgtagtactaaaaacttcagtatgcagctttgacagatattacacagacagtacagctaaatcaaccacaataggctttaaaacacttaacacacaaacatttagatatcatgactggcaggaaccacctacaacaggatacaaaccacaaaacctactatggttttatggagcagaaaacggatcaccagtagaccccaacaacacaatagtatcaaacctaatatacttaggaggcacaggaccttatgaaaaaggcacaccaataaaaacaaacataagcaattacttttcagagcctaaactgtggggaaatatatttcacgatgattatacatcaggaacatcacccgtgtttgttacaaacaaatcaccatcagaaattaaaaccgcatggaacactataaaagacttaactgttaaagctagcggtgtatttacattaagaacaattccactatggctaccttgcagatacaacccatttgcagacaaagcaaccaacaacaaaatatggctagtttctatacattcagaccacacagaatggaaaccaatagacaatccattactacaacgaacagaccttcctttatggttacttgtatggggttggcaagattggcagaaaaaaaaccaacaaacttcacaacctgatattaattatttaacagtaatatcttcaccatatatatcatgctacccaaaattagattactatgtgttactagatgaaggattttgggagggtcactcaacatacatagagtcaattacagactcagacaaaaaacactggtaccctaaaaatagatttcaaatagaaacacttaatctaatagctaacacaggtccaggaactgtaaaactaagagaaaaccaagcagcagaaggtcacatggtatatcgctttaattttaagcttggaggatgtcccgcaccgatggaaaaaatatgtgaccctagcaaacaatccaaatatcctattcccaataaccagcaacaaacaacttcgttgcagagtccagaaaacccaattcaaacctatctctacgacttcgacgaaaggaggggcctacttacagaaagagctacaaaaagaatcaaacaagatcacacatctgaaaaaactgttttgccatttacaggagcagcaacagacctccccatactccaaacaacatcacaggaggaaagctcctcggaagaagaagaagagcaacaagcggagaagaaactactccagctccgaagaaagcagcaccgactccgggagcgaatcctccagctattagacatacaaaatacataataaaacaaagtactgtaaaaattgatatgtttggagatactcatgtacctaaccgtagaatgaccccagaagaatttgaacaagaactaattgtcgctggtgtttttcgcagacctccttgttactatataaaagatagacctacttatccttatgtaccaaaacctactgatgaaaaatgtatggtaaactttgacttaaactttccttaataaaatgaatgcaattgttgttgttaacggggatcctcatcgcggccgctacgtaaattccgccccccccccccctctccctcccccccccctaacgttactggccgaagccgcttggaataaggccggtgtgcgtttgtctatatgttattttccaccatattgccgtcttttggcaatgtgagggcccggaaacctggccctgtcttcttgacgagcattcctaggggtctttcccctctcgccaaaggaatgcaaggtctgttgaatgtcgtgaaggaagcagttcctctggaagcttcttgaagacaaacaacgtctgtagcgaccctttgcaggcagcggaaccccccacctggcgacaggtgcctctgcggccaaaagccacgtgtataagatacacctgcaaaggcggcacaaccccagtgccacgttgtgagttggatagttgtggaaagagtcaaatggctctcctcaagcgtattcaacaaggggctgaaggatgcccagaaggtaccccattgtatgggatctgatctggggcctcggtgcacatgctttacatgtgtttagtcgaggttaaaaaaacgtctaggccccccgaaccacggggacgtggttttcctttgaaaaacacgatgataatatggccacaaccatggataaagttttaaacagagaggaatctttgcagctaatggaccttctaggtcttgaaaggagtgcctgggggaatattcctctgatgagaaaggcatatttaaaaaaatgcaaggagtttcatcctgataaaggaggagatgaagaaaaaatgaagaaaatgaatactctgtacaagaaaatggaagatggagtaaaatatgctcatcaacctgactttggaggcttctgggatgcaactgagattccaacctatggaactgatgaatgggagcagtggtggaatgcctttaatgaggaaaacctgttttgctcagaagaaatgccatctagtgatgatgaggctactgctgactctcaacattctactcctccaaaaaagaagagaaaggtagaagaccccaaggactttccttcagaattgctaagttttttgagtcatgctgtgtttagtaatagaactcttgcttgctttgctatttacaccacaaaggaaaaagctgcactgctatacaagaaaattatggaaaaatattctgtaacctttataagtaggcataacagttataatcataacatactgttttttcttactccacacaggcatagagtgtctgctattaataactatgctcaaaaattgtgtacctttagctttttaatttgtaaaggggttaataaggaatatttgatgtatagtgccttgactagagatccattttctgttattgaggaaagtttgccaggtgggttaaaggagcatgattttaatccagaagaagcagaggaaactaaacaagtgtcctggaagcttgtaacagagtatgcaatggaaacaaaatgtgatgatgtgttgttattgcttgggatgtacttggaatttcagtacagttttgaaatgtgtttaaaatgtattaaaaaagaacagcccagccactataagtaccatgaaaagcattatgcaaatgctgctatatttgctgacagcaaaaaccaaaaaaccatatgccaacaggctgttgatactgttttagctaaaaagcgggttgatagcctacaattaactagagaacaaatgttaacaaacagatttaatgatcttttggataggatggatataatgtttggttctacaggctctgctgacatagaagaatggatggctggagttgcttggctacactgtttgttgcccaaaatggattcagtggtgtatgactttttaaaatgcatggtgtacaacattcctaaaaaaagatactggctgtttaaaggaccaattgatagtggtaaaactacattagcagctgctttgcttgaattatgtggggggaaagctttaaatgttaatttgcccttggacaggctgaactttgagctaggagtagctattgaccagtttttagtagtttttgaggatgtaaagggcactggaggggagtccagagatttgccttcaggtcagggaattaataacctggacaatttaagggattatttggatggcagtgttaaggtaaacttagaaaagaaacacctaaataaaagaactcaaatatttccccctggaatagtcaccatgaatgagtacagtgtgcctaaaacactgcaggccagatttgtaaaacaaatagattttaggcccaaagattatttaaagcattgcctggaacgcagtgagtttttgttagaaaagagaataattcaaagtggcattgctttgcttcttatgttaatttggtacagacctgtggctgagtttgctcaaagtattcagagcagaattgtggagtggaaagagagattggacaaagagtttagtttgtcagtgtatcaaaaaatgaagtttaatgtggctatgggaattggagttttagattggctaagaaacagtgatgatgatgatgaagacagccaggaaaatgctgataaaaatgaagatggtggggagaagaacatggaagactcagggcatgaaacaggcattgattcacagtcccaaggctcatttcaggcccctcagtcctcacagtctgttcatgatcataatcagccataccacatttgtagaggttttacttgctttaaaaaacctcccacacctccccctgaacctgaaacataataagcttgcggccgcttcgagcagacatgataagatacattgatgagtttggacaaaccacaactagaatgcagtgaaaaaaatgctttatttgtgaaatttgtgatgctattgctttatttgtaaccattataagctgcaataaacaagtttcatgtctggctctagctatcccgcccctaactccgcccatcccgcccctaactccgcccagttccgcccattctccgccccatggctgactaattttttttatttatgcagaggccgaggccgcctcggcctctgagctattccagaagtagtgaggaggcttttttggaggccatcggatcccgggcccgtcgactgcagaggcctgcatgcaagcttggtgtaatcatggtcatagctgtttcctgtgtgaaattgttatccgctcacaattccacacaacatacgagccggaagcataaagtgtaaagcctggggtgcctaatgagtgagctaactcacattaattgcgttgcgctcactgcccgctttccagtcgggaaacctgtcgtgccagctgcattaatgaatcggccaacgcgcggggagaggcggtttgcgtattgggcgctcttccgcttcctcgctcactgactcgctgcgctcggtcgttcggctgcggcgagcggtatcagctcactcaaaggcggtaatacggttatccacagaatcaggggataacgcaggaaagaacatgtgagcaaaaggccagcaaaaggccaggaaccgtaaaaaggccgcgttgctggcgtttttccataggctccgcccccctgacgagcatcacaaaaatcgacgctcaagtcagaggtggcgaaacccgacaggactataaagataccaggcgtttccccctggaagctccctcgtgcgctctcctgttccgaccctgccgcttaccggatacctgtccgcctttctcccttcgggaagcgtggcgctttctcatagctcacgctgtaggtatctcagttcggtgtaggtcgttcgctccaagctgggctgtgtgcacgaaccccccgttcagcccgaccgctgcgccttatccggtaactatcgtcttgagtccaacccggtaagacacgacttatcgccactggcagcagccactggtaacaggattagcagagcgaggtatgtaggcggtgctacagagttcttgaagtggtggcctaactacggctacactagaagaacagtatttggtatctgcgctctgctgaagccagttaccttcggaaaaagagttggtagctcttgatccggcaaacaaaccaccgctggtagcggtggtttttttgtttgcaagcagcagattacgcgcagaaaaaaaggatctcaagaagatcctttgatcttttctacggggtctgacgctcagtggaacgaaaactcacgttaagggattttggtcatgagattatcaaaaaggatcttcacctagatccttttaaattaaaaatgaagttttaaatcaagcccaatctgaataatgttacaaccaattaaccaattctgattagaaaaactcatcgagcatcaaatgaaactgcaatttattcatatcaggattatcaataccatatttttgaaaaagccgtttctgtaatgaaggagaaaactcaccgaggcagttccataggatggcaagatcctggtatcggtctgcgattccgactcgtccaacatcaatacaacctattaatttcccctcgtcaaaaataaggttatcaagtgagaaatcaccatgagtgacgactgaatccggtgagaatggcaaaagtttatgcatttctttccagacttgttcaacaggccagccattacgctcgtcatcaaaatcactcgcatcaaccaaaccgttattcattcgtgattgcgcctgagcgagacgaaatacgcgatcgctgttaaaaggacaattacaaacaggaatcgaatgcaaccggcgcaggaacactgccagcgcatcaacaatattttcacctgaatcaggatattcttctaatacctggaatgctgtttttccggggatcgcagtggtgagtaaccatgcatcatcaggagtacggataaaatgcttgatggtcggaagaggcataaattccgtcagccagtttagtctgaccatctcatctgtaacatcattggcaacgctacctttgccatgtttcagaaacaactctggcgcatcgggcttcccatacaagcgatagattgtcgcacctgattgcccgacattatcgcgagcccatttatacccatataaatcagcatccatgttggaatttaatcgcggcctcgacgtttcccgttgaatatggctcataacaccccttgtattactgtttatgtaagcagacagttttattgttcatgatgatatatttttatcttgtgcaatgtaacatcagagattttgagacacgggccagagctgca

SEQ ID NO: 2001 - protein, 708 aa, synthetic construct
MDKVLNREESLQLMDLLGLERSAWGNIPLMRKAYLKKCKEFHPDKGGDEEKMKKMNTLYKKMEDGVKYAHQPDFGGFWDATEIPTYGTDEWEQWWNAFNEENLFCSEEMPSSDDEATADSQHSTPPKKKRKVEDPKDFPSELLSFLSHAVFSNRTLACFAIYTTKEKAALLYKKIMEKYSVTFISRHNSYNHNILFFLTPHRHRVSAINNYAQKLCTFSFLICKGVNKEYLMYSALTRDPFSVIEESLPGGLKEHDFNPEEAEETKQVSWKLVTEYAMETKCDDVLLLLGMYLEFQYSFEMCLKCIKKEQPSHYKYHEKHYANAAIFADSKNQKTICQQAVDTVLAKKRVDSLQLTREQMLTNRFNDLLDRMDIMFGSTGSADIEEWMAGVAWLHCLLPKMDSVVYDFLKCMVYNIPKKRYWLFKGPIDSGKTTLAAALLELCGGKALNVNLPLDRLNFELGVAIDQFLVVFEDVKGTGGESRDLPSGQGINNLDNLRDYLDGSVKVNLEKKHLNKRTQIFPPGIVTMNEYSVPKTLQARFVKQIDFRPKDYLKHCLERSEFLLEKRIIQSGIALLLMLIWYRPVAEFAQSIQSRIVEWKERLDKEFSLSVYQKMKFNVAMGIGVLDWLRNSDDDDEDSQENADKNEDGGEKNMEDSGHETGIDSQSQGSFQAPQSSQSVHDHNQPYHICRGFTCFKKPPTPPPEPET

SEQ ID NO: 2002 - DNA, 9296 bp, synthetic construct
  source 1..9296: mol_type = other DNA
tcgcgcgtttcggtgatgacggtgaaaacctctgacacatgcagctcccggagacggtcacagcttgtctgtaagcggatgccgggagcagacaagcccgtcagggcgcgtcagcgggtgttggcgggtgtcggggctggcttaactatgcggcatcagagcagattgtactgagagtgcaccatatgcggtgtgaaataccgcacagatgcgtaaggagaaaataccgcatcaggcgccattcgccattcaggctgcgcaactgttgggaagggcgatcggtgcgggcctcttcgctattacgccagctggcgaaagggggatgtgctgcaaggcgattaagttgggtaacgccagggttttcccagtcacgacgttgtaaaacgacggccagagaattcgagctcggtacctcgcgaatacatctagatatggggtctcaatggttggctccggtgcccgtcagtgggcagagcgcacatcgcccacagtccccgagaagttgtggggaggggtcggcaattgaaccggtgcctagagaaggtggcgcggggtaaactgggaaagtgatgtcgtgtactggctccgcctttttcccgagggtgggggagaaccgtatataagtgcagtagtcgccgtgaacgttctttttcgcaacgggtttgccgccagaacacaggtaagtgccgtgtgtggttcccgcgggcctggcctctttacgggttatggcccttgcgtgccttgaattacttccacctggctgcagtacgtgattcttgatcccgagcttcgggttggaagtgggtgggagagttcgaggccttgcgcttaaggagccccttcgcctcgtgcttgagttgaggcctggcctgggcgctggggccaccgcgtgcgaatctggtggcaccttcgcgcctgtctcgctgctttcgataagtctctagccatttaaaatttttgatgacctgctgcgacgctttttttctggcaagatagtcttgtaaatgcgggccaagatctgcacactggtatttcggtttttggggccgcgggcggcgacggggcccgtgcgtcccagcgcacatgttcggcgaggcggggcctgcgagcgcggccaccgagaatcggacgggggtagtctcaagctggccggcctgctctggtgcctggcctcgcgccgccgtgtatcgccccgccctgggcggcaaggctggcccggtcggcaccagttgcgtgagcggaaagatggccgcttcccggccctgctgcagggagctcaaaatggaggacgcggcgctcgggagagcgggcgggtgagtcacccacacaaaggaaaagggcctttccgtcctcagccgtcgcttcatgtgactccacggagtaccgggcgccgtccaggcacctcgattagttctcgagcttttggagtacgtcgtctttaggttggggggaggggttttatgcgatggagtttccccacactgagtgggtggagactgaagttaggccagcttggcacttgatgtaattctccttggaatttgccctttttgagtttggatcttggttcattctcaagcctcagacagtggttcaaagtttttttcttccatttcaggtggtggatctacaaaaaagcagatccaccggtcgccaccccgaagatgcaaatacaaccacctattagaaccttcaaacaaacaatttcagattggaaaaacttaattgtccacgttcacgacaacatttgcaactgcaataaaccattagaacacactattgatacctgtatcaccaatccagatgaattaagattaaacaaatctactaaacaacaactacaaaaatgccttggtaccccagaagaagatacccaagaagacgttatcgatggcttcgcagatggagagctagacgcccttttcgcccaagatacagaagaagatactgggtaagaaactattctcgaaagagaaaactatttaaaataacaaccaaagaatggcaaccaaaagttataagaaagactcatgtaaagggcacctatcctttgtttctttgtacaaagcacagaattaacaataatatgatacaatatttagactctatagctccagaacactattacggaggaggaggattttcaataatgcaattttccttacaagccttatatgaagaatttataaaagcaaaaaactggtggactaatacaaactgctttttaccacttgtaagatatatgggttgctcattcaaattttataaaactgaattttatgattatattgtactaattgaaagatgttatccacttgcttgtactgatgaaatgtacttatctactcaacctagtattatgatgcttacaagaaaatgtatttttgtaccatgcaaacaaaacagcaaaggtaaaaaaccttacaaaaaagttagagtaagaccaccttcacaaatgactacaggatggcatttctcacaagacttagcaaacatgccacttgtagtactaaaaacttcagtatgcagctttgacagatattacacagacagtacagctaaatcaaccacaataggctttaaaacacttaacacacaaacatttagatatcatgactggcaggaaccacctacaacaggatacaaaccacaaaacctactatggttttatggagcagaaaacggatcaccagtagaccccaacaacacaatagtatcaaacctaatatacttaggaggcacaggaccttatgaaaaaggcacaccaataaaaacaaacataagcaattacttttcagagcctaaactgtggggaaatatatttcacgatgattatacatcaggaacatcacccgtgtttgttacaaacaaatcaccatcagaaattaaaaccgcatggaacactataaaagacttaactgttaaagctagcggtgtatttacattaagaacaattccactatggctaccttgcagatacaacccatttgcagacaaagcaaccaacaacaaaatatggctagtttctatacattcagaccacacagaatggaaaccaatagacaatccattactacaacgaacagaccttcctttatggttacttgtatggggttggcaagattggcagaaaaaaaaccaacaaacttcacaacctgatattaattatttaacagtaatatcttcaccatatatatcatgctacccaaaattagattactatgtgttactagatgaaggattttgggagggtcactcaacatacatagagtcaattacagactcagacaaaaaacactggtaccctaaaaatagatttcaaatagaaacacttaatctaatagctaacacaggtccaggaactgtaaaactaagagaaaaccaagcagcagaaggtcacatggtatatcgctttaattttaagcttggaggatgtcccgcaccgatggaaaaaatatgtgaccctagcaaacaatccaaatatcctattcccaataaccagcaacaaacaacttcgttgcagagtccagaaaacccaattcaaacctatctctacgacttcgacgaaaggaggggcctacttacagaaagagctacaaaaagaatcaaacaagatcacacatctgaaaaaactgttttgccatttacaggagcagcaacagacctccccatactccaaacaacatcacaggaggaaagctcctcggaagaagaagaagagcaacaagcggagaagaaactactccagctccgaagaaagcagcaccgactccgggagcgaatcctccagctattagacatacaaaatacataataaaacaaagtactgtaaaaattgatatgtttggagatactcatgtacctaaccgtagaatgaccccagaagaatttgaacaagaactaattgtcgctggtgtttttcgcagacctccttgttactatataaaagatagacctacttatccttatgtaccaaaacctactgatgaaaaatgtatggtaaactttgacttaaactttccttaataatgagacctaaaatgaatgcaattgttgttgttaacggggatcctcatcgcggccgctacgtaaattccgccccccccccccctctccctcccccccccctaacgttactggccgaagccgcttggaataaggccggtgtgcgtttgtctatatgttattttccaccatattgccgtcttttggcaatgtgagggcccggaaacctggccctgtcttcttgacgagcattcctaggggtctttcccctctcgccaaaggaatgcaaggtctgttgaatgtcgtgaaggaagcagttcctctggaagcttcttgaagacaaacaacgtctgtagcgaccctttgcaggcagcggaaccccccacctggcgacaggtgcctctgcggccaaaagccacgtgtataagatacacctgcaaaggcggcacaaccccagtgccacgttgtgagttggatagttgtggaaagagtcaaatggctctcctcaagcgtattcaacaaggggctgaaggatgcccagaaggtaccccattgtatgggatctgatctggggcctcggtgcacatgctttacatgtgtttagtcgaggttaaaaaaacgtctaggccccccgaaccacggggacgtggttttcctttgaaaaacacgatgataatatggccacaaccatggataaagttttaaacagagaggaatctttgcagctaatggaccttctaggtcttgaaaggagtgcctgggggaatattcctctgatgagaaaggcatatttaaaaaaatgcaaggagtttcatcctgataaaggaggagatgaagaaaaaatgaagaaaatgaatactctgtacaagaaaatggaagatggagtaaaatatgctcatcaacctgactttggaggcttctgggatgcaactgagattccaacctatggaactgatgaatgggagcagtggtggaatgcctttaatgaggaaaacctgttttgctcagaagaaatgccatctagtgatgatgaggctactgctgactctcaacattctactcctccaaaaaagaagagaaaggtagaagaccccaaggactttccttcagaattgctaagttttttgagtcatgctgtgtttagtaatagaactcttgcttgctttgctatttacaccacaaaggaaaaagctgcactgctatacaagaaaattatggaaaaatattctgtaacctttataagtaggcataacagttataatcataacatactgttttttcttactccacacaggcatagagtgtctgctattaataactatgctcaaaaattgtgtacctttagctttttaatttgtaaaggggttaataaggaatatttgatgtatagtgccttgactagagatccattttctgttattgaggaaagtttgccaggtgggttaaaggagcatgattttaatccagaagaagcagaggaaactaaacaagtgtcctggaagcttgtaacagagtatgcaatggaaacaaaatgtgatgatgtgttgttattgcttgggatgtacttggaatttcagtacagttttgaaatgtgtttaaaatgtattaaaaaagaacagcccagccactataagtaccatgaaaagcattatgcaaatgctgctatatttgctgacagcaaaaaccaaaaaaccatatgccaacaggctgttgatactgttttagctaaaaagcgggttgatagcctacaattaactagagaacaaatgttaacaaacagatttaatgatcttttggataggatggatataatgtttggttctacaggctctgctgacatagaagaatggatggctggagttgcttggctacactgtttgttgcccaaaatggattcagtggtgtatgactttttaaaatgcatggtgtacaacattcctaaaaaaagatactggctgtttaaaggaccaattgatagtggtaaaactacattagcagctgctttgcttgaattatgtggggggaaagctttaaatgttaatttgcccttggacaggctgaactttgagctaggagtagctattgaccagtttttagtagtttttgaggatgtaaagggcactggaggggagtccagagatttgccttcaggtcagggaattaataacctggacaatttaagggattatttggatggcagtgttaaggtaaacttagaaaagaaacacctaaataaaagaactcaaatatttccccctggaatagtcaccatgaatgagtacagtgtgcctaaaacactgcaggccagatttgtaaaacaaatagattttaggcccaaagattatttaaagcattgcctggaacgcagtgagtttttgttagaaaagagaataattcaaagtggcattgctttgcttcttatgttaatttggtacagacctgtggctgagtttgctcaaagtattcagagcagaattgtggagtggaaagagagattggacaaagagtttagtttgtcagtgtatcaaaaaatgaagtttaatgtggctatgggaattggagttttagattggctaagaaacagtgatgatgatgatgaagacagccaggaaaatgctgataaaaatgaagatggtggggagaagaacatggaagactcagggcatgaaacaggcattgattcacagtcccaaggctcatttcaggcccctcagtcctcacagtctgttcatgatcataatcagccataccacatttgtagaggttttacttgctttaaaaaacctcccacacctccccctgaacctgaaacataataagcttgcggccgcttcgagcagacatgataagatacattgatgagtttggacaaaccacaactagaatgcagtgaaaaaaatgctttatttgtgaaatttgtgatgctattgctttatttgtaaccattataagctgcaataaacaagtttcatgtctggctctagctatcccgcccctaactccgcccatcccgcccctaactccgcccagttccgcccattctccgccccatggctgactaattttttttatttatgcagaggccgaggccgcctcggcctctgagctattccagaagtagtgaggaggcttttttggaggccatcggatcccgggcccgtcgactgcagaggcctgcatgcaagcttggtgtaatcatggtcatagctgtttcctgtgtgaaattgttatccgctcacaattccacacaacatacgagccggaagcataaagtgtaaagcctggggtgcctaatgagtgagctaactcacattaattgcgttgcgctcactgcccgctttccagtcgggaaacctgtcgtgccagctgcattaatgaatcggccaacgcgcggggagaggcggtttgcgtattgggcgctcttccgcttcctcgctcactgactcgctgcgctcggtcgttcggctgcggcgagcggtatcagctcactcaaaggcggtaatacggttatccacagaatcaggggataacgcaggaaagaacatgtgagcaaaaggccagcaaaaggccaggaaccgtaaaaaggccgcgttgctggcgtttttccataggctccgcccccctgacgagcatcacaaaaatcgacgctcaagtcagaggtggcgaaacccgacaggactataaagataccaggcgtttccccctggaagctccctcgtgcgctctcctgttccgaccctgccgcttaccggatacctgtccgcctttctcccttcgggaagcgtggcgctttctcatagctcacgctgtaggtatctcagttcggtgtaggtcgttcgctccaagctgggctgtgtgcacgaaccccccgttcagcccgaccgctgcgccttatccggtaactatcgtcttgagtccaacccggtaagacacgacttatcgccactggcagcagccactggtaacaggattagcagagcgaggtatgtaggcggtgctacagagttcttgaagtggtggcctaactacggctacactagaagaacagtatttggtatctgcgctctgctgaagccagttaccttcggaaaaagagttggtagctcttgatccggcaaacaaaccaccgctggtagcggtggtttttttgtttgcaagcagcagattacgcgcagaaaaaaaggatctcaagaagatcctttgatcttttctacggggtctgacgctcagtggaacgaaaactcacgttaagggattttggtcatgagattatcaaaaaggatcttcacctagatccttttaaattaaaaatgaagttttaaatcaagcccaatctgaataatgttacaaccaattaaccaattctgattagaaaaactcatcgagcatcaaatgaaactgcaatttattcatatcaggattatcaataccatatttttgaaaaagccgtttctgtaatgaaggagaaaactcaccgaggcagttccataggatggcaagatcctggtatcggtctgcgattccgactcgtccaacatcaatacaacctattaatttcccctcgtcaaaaataaggttatcaagtgagaaatcaccatgagtgacgactgaatccggtgagaatggcaaaagtttatgcatttctttccagacttgttcaacaggccagccattacgctcgtcatcaaaatcactcgcatcaaccaaaccgttattcattcgtgattgcgcctgagcgagacgaaatacgcgatcgctgttaaaaggacaattacaaacaggaatcgaatgcaaccggcgcaggaacactgccagcgcatcaacaatattttcacctgaatcaggatattcttctaatacctggaatgctgtttttccggggatcgcagtggtgagtaaccatgcatcatcaggagtacggataaaatgcttgatggtcggaagaggcataaattccgtcagccagtttagtctgaccatctcatctgtaacatcattggcaacgctacctttgccatgtttcagaaacaactctggcgcatcgggcttcccatacaagcgatagattgtcgcacctgattgcccgacattatcgcgagcccatttatacccatataaatcagcatccatgttggaatttaatcgcggcctcgacgtttcccgttgaatatggctcataacaccccttgtattactgtttatgtaagcagacagttttattgttcatgatgatatatttttatcttgtgcaatgtaacatcagagattttgagacacgggccagagctgca

SEQ ID NO: 2003 - DNA, 9418 bp, synthetic construct
  source 1..9418: mol_type = other DNA
tcgcgcgtttcggtgatgacggtgaaaacctctgacacatgcagctcccggagacggtcacagcttgtctgtaagcggatgccgggagcagacaagcccgtcagggcgcgtcagcgggtgttggcgggtgtcggggctggcttaactatgcggcatcagagcagattgtactgagagtgcaccatatgcggtgtgaaataccgcacagatgcgtaaggagaaaataccgcatcaggcgccattcgccattcaggctgcgcaactgttgggaagggcgatcggtgcgggcctcttcgctattacgccagctggcgaaagggggatgtgctgcaaggcgattaagttgggtaacgccagggttttcccagtcacgacgttgtaaaacgacggccagagaattcgagctcggtacctcgcgaatacatctagatatggttggctccggtgcccgtcagtgggcagagcgcacatcgcccacagtccccgagaagttgtggggaggggtcggcaattgaaccggtgcctagagaaggtggcgcggggtaaactgggaaagtgatgtcgtgtactggctccgcctttttcccgagggtgggggagaaccgtatataagtgcagtagtcgccgtgaacgttctttttcgcaacgggtttgccgccagaacacaggtaagtgccgtgtgtggttcccgcgggcctggcctctttacgggttatggcccttgcgtgccttgaattacttccacctggctgcagtacgtgattcttgatcccgagcttcgggttggaagtgggtgggagagttcgaggccttgcgcttaaggagccccttcgcctcgtgcttgagttgaggcctggcctgggcgctggggccaccgcgtgcgaatctggtggcaccttcgcgcctgtctcgctgctttcgataagtctctagccatttaaaatttttgatgacctgctgcgacgctttttttctggcaagatagtcttgtaaatgcgggccaagatctgcacactggtatttcggtttttggggccgcgggcggcgacggggcccgtgcgtcccagcgcacatgttcggcgaggcggggcctgcgagcgcggccaccgagaatcggacgggggtagtctcaagctggccggcctgctctggtgcctggcctcgcgccgccgtgtatcgccccgccctgggcggcaaggctggcccggtcggcaccagttgcgtgagcggaaagatggccgcttcccggccctgctgcagggagctcaaaatggaggacgcggcgctcgggagagcgggcgggtgagtcacccacacaaaggaaaagggcctttccgtcctcagccgtcgcttcatgtgactccacggagtaccgggcgccgtccaggcacctcgattagttctcgagcttttggagtacgtcgtctttaggttggggggaggggttttatgcgatggagtttccccacactgagtgggtggagactgaagttaggccagcttggcacttgatgtaattctccttggaatttgccctttttgagtttggatcttggttcattctcaagcctcagacagtggttcaaagtttttttcttccatttcaggtggatgtttatgccgctagacggagaacgcatcagttactgactgcggactgaacttgggcgggtgccgaaggtgagtgaaaccaccgaagtcaaggggcaattcgggctagttcagtctagcggaacgggcaagaaacttaaaattattttatttttcagatgagcgactgctttaaaccaacatgctacaacaacaaaacaaagcaaactcactggattaataacctgcatttaacccacgacctgatctgcttctgcccaacaccaactagacacttattactagctttagcagaacaacaagaaacaattgaagtgtctaaacaagaaaaagaaaaaataacaagatgccttattactacagaagaagacggtacaactacagacgtcctagatggtatggacgaggttggattagacgcccttttcgcagaagatttcgaagaaaaagaagggtaagacctacttatactactattcctctaaagcaatggcaaccgccatataaaagaacatgctatataaaaggacaagactgtttaatatactatagcaacttaagactgggaatgaatagtacaatgtatgaaaaaagtattgtacctgtacattggccgggagggggttctttttctgtaagcatgttaactttagatgccttgtatgatatacataaactttgtagaaactggtggacatccacaaaccaagacttaccactagtaagatataaaggatgcaaaataacattttatcaaagcacatttacagactacatagtaagaatacatacagaactaccagctaacagtaacaaactaacatacccaaacacacatccactaatgatgatgatgtctaagtacaaacacattatacctagtagacaaacaagaagaaaaaagaaaccatacacaaaaatatttgtaaaaccacctccgcaatttgaaaacaaatggtactttgctacagacctctacaaaattccattactacaaatacactgcacagcatgcaacttacaaaacccatttgtaaaaccagacaaattatcaaacaatgttacattatggtcactaaacaccataagcatacaaaatagaaacatgtcagtggatcaaggacaatcatggccatttaaaatactaggaacacaaagcttttatttttacttttacaccggagcaaacctaccaggtgacacaacacaaataccagtagcagacctattaccactaacaaacccaagaataaacagaccaggacaatcactaaatgaggcaaaaattacagaccatattactttcacagaatacaaaaacaaatttacaaattattggggtaacccatttaataaacacattcaagaacacctagatatgatactatactcactaaaaagtccagaagcaataaaaaacgaatggacaacagaaaacatgaaatggaaccaattaaacaatgcaggaacaatggcattaacaccatttaacgagccaatattcacacaaatacaatataacccagatagagacacaggagaagacactcaattatacctactctctaacgctacaggaacaggatgggacccaccaggaattccagaattaatactagaaggatttccactatggttaatatattggggatttgcagactttcaaaaaaacctaaaaaaagtaacaaacatagacacaaattacatgttagtagcaaaaacaaaatttacacaaaaacctggcacattctacttagtaatactaaatgacacctttgtagaaggcaatagcccatatgaaaaacaacctttacctgaagacaacattaaatggtacccacaagtacaataccaattagaagcacaaaacaaactactacaaactgggccatttacaccaaacatacaaggacaactatcagacaatatatcaatgttttataaattttactttaaatggggaggaagcccaccaaaagcaattaatgttgaaaatcctgcccaccagattcaatatcccataccccgtaacgagcatgaaacaacttcgttacagagtccaggggaagccccagaatccatcttatactccttcgactatagacacgggaactacacaacaacagctttgtcacgaattagccaagactgggcacttaaagacactgtttctaaaattacagagccagatcgacagcaactgctcaaacaagccctcgaatgcctgcaaatctcggaagaaacgcaggagaaaaaagaaaaagaagtacagcagctcatcagcaacctcagacagcagcagcagctgtacagagagcgaataatatcattattaaaggaccaataacttttaactgtgtaaaaaaggtgaaattgtttgatgataaaccaaaaaaccgtagatttacacctgaggaatttgaaactgagttacaaatagcaaaatggttaaagaggcccccaagatcctttgtaaatgatcctcccttttacccatggttaccacctgaacctgttgtaaactttaagcttaattttactgaataataaaatgaatgcaattgttgttgttaacggggatcctcatcgcggccgctacgtaaattccgccccccccccccctctccctcccccccccctaacgttactggccgaagccgcttggaataaggccggtgtgcgtttgtctatatgttattttccaccatattgccgtcttttggcaatgtgagggcccggaaacctggccctgtcttcttgacgagcattcctaggggtctttcccctctcgccaaaggaatgcaaggtctgttgaatgtcgtgaaggaagcagttcctctggaagcttcttgaagacaaacaacgtctgtagcgaccctttgcaggcagcggaaccccccacctggcgacaggtgcctctgcggccaaaagccacgtgtataagatacacctgcaaaggcggcacaaccccagtgccacgttgtgagttggatagttgtggaaagagtcaaatggctctcctcaagcgtattcaacaaggggctgaaggatgcccagaaggtaccccattgtatgggatctgatctggggcctcggtgcacatgctttacatgtgtttagtcgaggttaaaaaaacgtctaggccccccgaaccacggggacgtggttttcctttgaaaaacacgatgataatatggccacaaccatggataaagttttaaacagagaggaatctttgcagctaatggaccttctaggtcttgaaaggagtgcctgggggaatattcctctgatgagaaaggcatatttaaaaaaatgcaaggagtttcatcctgataaaggaggagatgaagaaaaaatgaagaaaatgaatactctgtacaagaaaatggaagatggagtaaaatatgctcatcaacctgactttggaggcttctgggatgcaactgagattccaacctatggaactgatgaatgggagcagtggtggaatgcctttaatgaggaaaacctgttttgctcagaagaaatgccatctagtgatgatgaggctactgctgactctcaacattctactcctccaaaaaagaagagaaaggtagaagaccccaaggactttccttcagaattgctaagttttttgagtcatgctgtgtttagtaatagaactcttgcttgctttgctatttacaccacaaaggaaaaagctgcactgctatacaagaaaattatggaaaaatattctgtaacctttataagtaggcataacagttataatcataacatactgttttttcttactccacacaggcatagagtgtctgctattaataactatgctcaaaaattgtgtacctttagctttttaatttgtaaaggggttaataaggaatatttgatgtatagtgccttgactagagatccattttctgttattgaggaaagtttgccaggtgggttaaaggagcatgattttaatccagaagaagcagaggaaactaaacaagtgtcctggaagcttgtaacagagtatgcaatggaaacaaaatgtgatgatgtgttgttattgcttgggatgtacttggaatttcagtacagttttgaaatgtgtttaaaatgtattaaaaaagaacagcccagccactataagtaccatgaaaagcattatgcaaatgctgctatatttgctgacagcaaaaaccaaaaaaccatatgccaacaggctgttgatactgttttagctaaaaagcgggttgatagcctacaattaactagagaacaaatgttaacaaacagatttaatgatcttttggataggatggatataatgtttggttctacaggctctgctgacatagaagaatggatggctggagttgcttggctacactgtttgttgcccaaaatggattcagtggtgtatgactttttaaaatgcatggtgtacaacattcctaaaaaaagatactggctgtttaaaggaccaattgatagtggtaaaactacattagcagctgctttgcttgaattatgtggggggaaagctttaaatgttaatttgcccttggacaggctgaactttgagctaggagtagctattgaccagtttttagtagtttttgaggatgtaaagggcactggaggggagtccagagatttgccttcaggtcagggaattaataacctggacaatttaagggattatttggatggcagtgttaaggtaaacttagaaaagaaacacctaaataaaagaactcaaatatttccccctggaatagtcaccatgaatgagtacagtgtgcctaaaacactgcaggccagatttgtaaaacaaatagattttaggcccaaagattatttaaagcattgcctggaacgcagtgagtttttgttagaaaagagaataattcaaagtggcattgctttgcttcttatgttaatttggtacagacctgtggctgagtttgctcaaagtattcagagcagaattgtggagtggaaagagagattggacaaagagtttagtttgtcagtgtatcaaaaaatgaagtttaatgtggctatgggaattggagttttagattggctaagaaacagtgatgatgatgatgaagacagccaggaaaatgctgataaaaatgaagatggtggggagaagaacatggaagactcagggcatgaaacaggcattgattcacagtcccaaggctcatttcaggcccctcagtcctcacagtctgttcatgatcataatcagccataccacatttgtagaggttttacttgctttaaaaaacctcccacacctccccctgaacctgaaacataataagcttgcggccgcttcgagcagacatgataagatacattgatgagtttggacaaaccacaactagaatgcagtgaaaaaaatgctttatttgtgaaatttgtgatgctattgctttatttgtaaccattataagctgcaataaacaagtttcatgtctggctctagctatcccgcccctaactccgcccatcccgcccctaactccgcccagttccgcccattctccgccccatggctgactaattttttttatttatgcagaggccgaggccgcctcggcctctgagctattccagaagtagtgaggaggcttttttggaggccatcggatcccgggcccgtcgactgcagaggcctgcatgcaagcttggtgtaatcatggtcatagctgtttcctgtgtgaaattgttatccgctcacaattccacacaacatacgagccggaagcataaagtgtaaagcctggggtgcctaatgagtgagctaactcacattaattgcgttgcgctcactgcccgctttccagtcgggaaacctgtcgtgccagctgcattaatgaatcggccaacgcgcggggagaggcggtttgcgtattgggcgctcttccgcttcctcgctcactgactcgctgcgctcggtcgttcggctgcggcgagcggtatcagctcactcaaaggcggtaatacggttatccacagaatcaggggataacgcaggaaagaacatgtgagcaaaaggccagcaaaaggccaggaaccgtaaaaaggccgcgttgctggcgtttttccataggctccgcccccctgacgagcatcacaaaaatcgacgctcaagtcagaggtggcgaaacccgacaggactataaagataccaggcgtttccccctggaagctccctcgtgcgctctcctgttccgaccctgccgcttaccggatacctgtccgcctttctcccttcgggaagcgtggcgctttctcatagctcacgctgtaggtatctcagttcggtgtaggtcgttcgctccaagctgggctgtgtgcacgaaccccccgttcagcccgaccgctgcgccttatccggtaactatcgtcttgagtccaacccggtaagacacgacttatcgccactggcagcagccactggtaacaggattagcagagcgaggtatgtaggcggtgctacagagttcttgaagtggtggcctaactacggctacactagaagaacagtatttggtatctgcgctctgctgaagccagttaccttcggaaaaagagttggtagctcttgatccggcaaacaaaccaccgctggtagcggtggtttttttgtttgcaagcagcagattacgcgcagaaaaaaaggatctcaagaagatcctttgatcttttctacggggtctgacgctcagtggaacgaaaactcacgttaagggattttggtcatgagattatcaaaaaggatcttcacctagatccttttaaattaaaaatgaagttttaaatcaagcccaatctgaataatgttacaaccaattaaccaattctgattagaaaaactcatcgagcatcaaatgaaactgcaatttattcatatcaggattatcaataccatatttttgaaaaagccgtttctgtaatgaaggagaaaactcaccgaggcagttccataggatggcaagatcctggtatcggtctgcgattccgactcgtccaacatcaatacaacctattaatttcccctcgtcaaaaataaggttatcaagtgagaaatcaccatgagtgacgactgaatccggtgagaatggcaaaagtttatgcatttctttccagacttgttcaacaggccagccattacgctcgtcatcaaaatcactcgcatcaaccaaaccgttattcattcgtgattgcgcctgagcgagacgaaatacgcgatcgctgttaaaaggacaattacaaacaggaatcgaatgcaaccggcgcaggaacactgccagcgcatcaacaatattttcacctgaatcaggatattcttctaatacctggaatgctgtttttccggggatcgcagtggtgagtaaccatgcatcatcaggagtacggataaaatgcttgatggtcggaagaggcataaattccgtcagccagtttagtctgaccatctcatctgtaacatcattggcaacgctacctttgccatgtttcagaaacaactctggcgcatcgggcttcccatacaagcgatagattgtcgcacctgattgcccgacattatcgcgagcccatttatacccatataaatcagcatccatgttggaatttaatcgcggcctcgacgtttcccgttgaatatggctcataacaccccttgtattactgtttatgtaagcagacagttttattgttcatgatgatatatttttatcttgtgcaatgtaacatcagagattttgagacacgggccagagctgca

SEQ ID NO: 2004 - DNA, 8612 bp, synthetic construct
  source 1..8612: mol_type = other DNA
tcgcgcgtttcggtgatgacggtgaaaacctctgacacatgcagctcccggagacggtcacagcttgtctgtaagcggatgccgggagcagacaagcccgtcagggcgcgtcagcgggtgttggcgggtgtcggggctggcttaactatgcggcatcagagcagattgtactgagagtgcaccatatgcggtgtgaaataccgcacagatgcgtaaggagaaaataccgcatcaggcgccattcgccattcaggctgcgcaactgttgggaagggcgatcggtgcgggcctcttcgctattacgccagctggcgaaagggggatgtgctgcaaggcgattaagttgggtaacgccagggttttcccagtcacgacgttgtaaaacgacggccagagaattcgagctcggtacctcgcgaatacatctagatatggggaatgaaagaccccacctgtaggtttggcaagctaggatcaaggttaggaacagagagacagcagaatatgggccaaacaggatatctgtggtaagcagttcctgccccggctcagggccaagaacagttggaacagcagaatatgggccaaacaggatatctgtggtaagcagttcctgccccggctcagggccaagaacagatggtccccagatgcggtcccgccctcagcagtttctagagaaccatcagatgtttccagggtgccccaaggacctgaaatgaccctgtgccttatttgaactaaccaatcagttcgcttctcgcttctgttcgcgcgcttctgctccccgagctcaataaaagagcccacaacccctcactcggcgcgatggatgtttatgccgccagacggagacgggatcacttcagtgactccaggctgaacttgggcgggagccgaaggtgagtgcaaccaccgtagtctaggggcaattcgggctagttcagtatggcggaacgggcaagaaacttaaatattattattttacagatgcaaatacaaccacctattagaaccttcaaacaaacaatttcagattggaaaaacttaattgtccacgttcacgacaacatttgcaactgcaataaaccattagaacacactattgatacctgtatcaccaatccagatgaattaagattaaacaaatctactaaacaacaactacaaaaatgccttggtaccccagaagaagatacccaagaagacgttatcgatggcttcgcagatggagagctagacgcccttttcgcccaagatacagaagaagatactgggtaagaaactattctcgaaagagaaaactatttaaaataacaaccaaagaatggcaaccaaaagttataagaaagactcatgtaaagggcacctatcctttgtttctttgtacaaagcacagaattaacaataatatgatacaatatttagactctatagctccagaacactattacggaggaggaggattttcaataatgcaattttccttacaagccttatatgaagaatttataaaagcaaaaaactggtggactaatacaaactgctttttaccacttgtaagatatatgggttgctcattcaaattttataaaactgaattttatgattatattgtactaattgaaagatgttatccacttgcttgtactgatgaaatgtacttatctactcaacctagtattatgatgcttacaagaaaatgtatttttgtaccatgcaaacaaaacagcaaaggtaaaaaaccttacaaaaaagttagagtaagaccaccttcacaaatgactacaggatggcatttctcacaagacttagcaaacatgccacttgtagtactaaaaacttcagtatgcagctttgacagatattacacagacagtacagctaaatcaaccacaataggctttaaaacacttaacacacaaacatttagatatcatgactggcaggaaccacctacaacaggatacaaaccacaaaacctactatggttttatggagcagaaaacggatcaccagtagaccccaacaacacaatagtatcaaacctaatatacttaggaggcacaggaccttatgaaaaaggcacaccaataaaaacaaacataagcaattacttttcagagcctaaactgtggggaaatatatttcacgatgattatacatcaggaacatcacccgtgtttgttacaaacaaatcaccatcagaaattaaaaccgcatggaacactataaaagacttaactgttaaagctagcggtgtatttacattaagaacaattccactatggctaccttgcagatacaacccatttgcagacaaagcaaccaacaacaaaatatggctagtttctatacattcagaccacacagaatggaaaccaatagacaatccattactacaacgaacagaccttcctttatggttacttgtatggggttggcaagattggcagaaaaaaaaccaacaaacttcacaacctgatattaattatttaacagtaatatcttcaccatatatatcatgctacccaaaattagattactatgtgttactagatgaaggattttgggagggtcactcaacatacatagagtcaattacagactcagacaaaaaacactggtaccctaaaaatagatttcaaatagaaacacttaatctaatagctaacacaggtccaggaactgtaaaactaagagaaaaccaagcagcagaaggtcacatggtatatcgctttaattttaagcttggaggatgtcccgcaccgatggaaaaaatatgtgaccctagcaaacaatccaaatatcctattcccaataaccagcaacaaacaacttcgttgcagagtccagaaaacccaattcaaacctatctctacgacttcgacgaaaggaggggcctacttacagaaagagctacaaaaagaatcaaacaagatcacacatctgaaaaaactgttttgccatttacaggagcagcaacagacctccccatactccaaacaacatcacaggaggaaagctcctcggaagaagaagaagagcaacaagcggagaagaaactactccagctccgaagaaagcagcaccgactccgggagcgaatcctccagctattagacatacaaaatacataataaaacaaagtactgtaaaaattgatatgtttggagatactcatgtacctaaccgtagaatgaccccagaagaatttgaacaagaactaattgtcgctggtgtttttcgcagacctccttgttactatataaaagatagacctacttatccttatgtaccaaaacctactgatgaaaaatgtatggtaaactttgacttaaactttccttaataaaatgaatgcaattgttgttgttaacggggatcctcatcgcggccgctacgtaaattccgccccccccccccctctccctcccccccccctaacgttactggccgaagccgcttggaataaggccggtgtgcgtttgtctatatgttattttccaccatattgccgtcttttggcaatgtgagggcccggaaacctggccctgtcttcttgacgagcattcctaggggtctttcccctctcgccaaaggaatgcaaggtctgttgaatgtcgtgaaggaagcagttcctctggaagcttcttgaagacaaacaacgtctgtagcgaccctttgcaggcagcggaaccccccacctggcgacaggtgcctctgcggccaaaagccacgtgtataagatacacctgcaaaggcggcacaaccccagtgccacgttgtgagttggatagttgtggaaagagtcaaatggctctcctcaagcgtattcaacaaggggctgaaggatgcccagaaggtaccccattgtatgggatctgatctggggcctcggtgcacatgctttacatgtgtttagtcgaggttaaaaaaacgtctaggccccccgaaccacggggacgtggttttcctttgaaaaacacgatgataatatggccacaaccatggataaagttttaaacagagaggaatctttgcagctaatggaccttctaggtcttgaaaggagtgcctgggggaatattcctctgatgagaaaggcatatttaaaaaaatgcaaggagtttcatcctgataaaggaggagatgaagaaaaaatgaagaaaatgaatactctgtacaagaaaatggaagatggagtaaaatatgctcatcaacctgactttggaggcttctgggatgcaactgagattccaacctatggaactgatgaatgggagcagtggtggaatgcctttaatgaggaaaacctgttttgctcagaagaaatgccatctagtgatgatgaggctactgctgactctcaacattctactcctccaaaaaagaagagaaaggtagaagaccccaaggactttccttcagaattgctaagttttttgagtcatgctgtgtttagtaatagaactcttgcttgctttgctatttacaccacaaaggaaaaagctgcactgctatacaagaaaattatggaaaaatattctgtaacctttataagtaggcataacagttataatcataacatactgttttttcttactccacacaggcatagagtgtctgctattaataactatgctcaaaaattgtgtacctttagctttttaatttgtaaaggggttaataaggaatatttgatgtatagtgccttgactagagatccattttctgttattgaggaaagtttgccaggtgggttaaaggagcatgattttaatccagaagaagcagaggaaactaaacaagtgtcctggaagcttgtaacagagtatgcaatggaaacaaaatgtgatgatgtgttgttattgcttgggatgtacttggaatttcagtacagttttgaaatgtgtttaaaatgtattaaaaaagaacagcccagccactataagtaccatgaaaagcattatgcaaatgctgctatatttgctgacagcaaaaaccaaaaaaccatatgccaacaggctgttgatactgttttagctaaaaagcgggttgatagcctacaattaactagagaacaaatgttaacaaacagatttaatgatcttttggataggatggatataatgtttggttctacaggctctgctgacatagaagaatggatggctggagttgcttggctacactgtttgttgcccaaaatggattcagtggtgtatgactttttaaaatgcatggtgtacaacattcctaaaaaaagatactggctgtttaaaggaccaattgatagtggtaaaactacattagcagctgctttgcttgaattatgtggggggaaagctttaaatgttaatttgcccttggacaggctgaactttgagctaggagtagctattgaccagtttttagtagtttttgaggatgtaaagggcactggaggggagtccagagatttgccttcaggtcagggaattaataacctggacaatttaagggattatttggatggcagtgttaaggtaaacttagaaaagaaacacctaaataaaagaactcaaatatttccccctggaatagtcaccatgaatgagtacagtgtgcctaaaacactgcaggccagatttgtaaaacaaatagattttaggcccaaagattatttaaagcattgcctggaacgcagtgagtttttgttagaaaagagaataattcaaagtggcattgctttgcttcttatgttaatttggtacagacctgtggctgagtttgctcaaagtattcagagcagaattgtggagtggaaagagagattggacaaagagtttagtttgtcagtgtatcaaaaaatgaagtttaatgtggctatgggaattggagttttagattggctaagaaacagtgatgatgatgatgaagacagccaggaaaatgctgataaaaatgaagatggtggggagaagaacatggaagactcagggcatgaaacaggcattgattcacagtcccaaggctcatttcaggcccctcagtcctcacagtctgttcatgatcataatcagccataccacatttgtagaggttttacttgctttaaaaaacctcccacacctccccctgaacctgaaacataataagcttgcggccgcttcgagcagacatgataagatacattgatgagtttggacaaaccacaactagaatgcagtgaaaaaaatgctttatttgtgaaatttgtgatgctattgctttatttgtaaccattataagctgcaataaacaagtttcatgtctggctctagctatcccgcccctaactccgcccatcccgcccctaactccgcccagttccgcccattctccgccccatggctgactaattttttttatttatgcagaggccgaggccgcctcggcctctgagctattccagaagtagtgaggaggcttttttggaggccatcggatcccgggcccgtcgactgcagaggcctgcatgcaagcttggtgtaatcatggtcatagctgtttcctgtgtgaaattgttatccgctcacaattccacacaacatacgagccggaagcataaagtgtaaagcctggggtgcctaatgagtgagctaactcacattaattgcgttgcgctcactgcccgctttccagtcgggaaacctgtcgtgccagctgcattaatgaatcggccaacgcgcggggagaggcggtttgcgtattgggcgctcttccgcttcctcgctcactgactcgctgcgctcggtcgttcggctgcggcgagcggtatcagctcactcaaaggcggtaatacggttatccacagaatcaggggataacgcaggaaagaacatgtgagcaaaaggccagcaaaaggccaggaaccgtaaaaaggccgcgttgctggcgtttttccataggctccgcccccctgacgagcatcacaaaaatcgacgctcaagtcagaggtggcgaaacccgacaggactataaagataccaggcgtttccccctggaagctccctcgtgcgctctcctgttccgaccctgccgcttaccggatacctgtccgcctttctcccttcgggaagcgtggcgctttctcatagctcacgctgtaggtatctcagttcggtgtaggtcgttcgctccaagctgggctgtgtgcacgaaccccccgttcagcccgaccgctgcgccttatccggtaactatcgtcttgagtccaacccggtaagacacgacttatcgccactggcagcagccactggtaacaggattagcagagcgaggtatgtaggcggtgctacagagttcttgaagtggtggcctaactacggctacactagaagaacagtatttggtatctgcgctctgctgaagccagttaccttcggaaaaagagttggtagctcttgatccggcaaacaaaccaccgctggtagcggtggtttttttgtttgcaagcagcagattacgcgcagaaaaaaaggatctcaagaagatcctttgatcttttctacggggtctgacgctcagtggaacgaaaactcacgttaagggattttggtcatgagattatcaaaaaggatcttcacctagatccttttaaattaaaaatgaagttttaaatcaagcccaatctgaataatgttacaaccaattaaccaattctgattagaaaaactcatcgagcatcaaatgaaactgcaatttattcatatcaggattatcaataccatatttttgaaaaagccgtttctgtaatgaaggagaaaactcaccgaggcagttccataggatggcaagatcctggtatcggtctgcgattccgactcgtccaacatcaatacaacctattaatttcccctcgtcaaaaataaggttatcaagtgagaaatcaccatgagtgacgactgaatccggtgagaatggcaaaagtttatgcatttctttccagacttgttcaacaggccagccattacgctcgtcatcaaaatcactcgcatcaaccaaaccgttattcattcgtgattgcgcctgagcgagacgaaatacgcgatcgctgttaaaaggacaattacaaacaggaatcgaatgcaaccggcgcaggaacactgccagcgcatcaacaatattttcacctgaatcaggatattcttctaatacctggaatgctgtttttccggggatcgcagtggtgagtaaccatgcatcatcaggagtacggataaaatgcttgatggtcggaagaggcataaattccgtcagccagtttagtctgaccatctcatctgtaacatcattggcaacgctacctttgccatgtttcagaaacaactctggcgcatcgggcttcccatacaagcgatagattgtcgcacctgattgcccgacattatcgcgagcccatttatacccatataaatcagcatccatgttggaatttaatcgcggcctcgacgtttcccgttgaatatggctcataacaccccttgtattactgtttatgtaagcagacagttttattgttcatgatgatatatttttatcttgtgcaatgtaacatcagagattttgagacacgggccagagctgca

SEQ ID NO: 2005 - DNA, 9292 bp, synthetic construct
  source 1..9292: mol_type = other DNA
tcgcgcgtttcggtgatgacggtgaaaacctctgacacatgcagctcccggagacggtcacagcttgtctgtaagcggatgccgggagcagacaagcccgtcagggcgcgtcagcgggtgttggcgggtgtcggggctggcttaactatgcggcatcagagcagattgtactgagagtgcaccatatgcggtgtgaaataccgcacagatgcgtaaggagaaaataccgcatcaggcgccattcgccattcaggctgcgcaactgttgggaagggcgatcggtgcgggcctcttcgctattacgccagctggcgaaagggggatgtgctgcaaggcgattaagttgggtaacgccagggttttcccagtcacgacgttgtaaaacgacggccagagaattcgagctcggtacctcgcgaatacatctagatatggttggctccggtgcccgtcagtgggcagagcgcacatcgcccacagtccccgagaagttgtggggaggggtcggcaattgaaccggtgcctagagaaggtggcgcggggtaaactgggaaagtgatgtcgtgtactggctccgcctttttcccgagggtgggggagaaccgtatataagtgcagtagtcgccgtgaacgttctttttcgcaacgggtttgccgccagaacacaggtaagtgccgtgtgtggttcccgcgggcctggcctctttacgggttatggcccttgcgtgccttgaattacttccacctggctgcagtacgtgattcttgatcccgagcttcgggttggaagtgggtgggagagttcgaggccttgcgcttaaggagccccttcgcctcgtgcttgagttgaggcctggcctgggcgctggggccaccgcgtgcgaatctggtggcaccttcgcgcctgtctcgctgctttcgataagtctctagccatttaaaatttttgatgacctgctgcgacgctttttttctggcaagatagtcttgtaaatgcgggccaagatctgcacactggtatttcggtttttggggccgcgggcggcgacggggcccgtgcgtcccagcgcacatgttcggcgaggcggggcctgcgagcgcggccaccgagaatcggacgggggtagtctcaagctggccggcctgctctggtgcctggcctcgcgccgccgtgtatcgccccgccctgggcggcaaggctggcccggtcggcaccagttgcgtgagcggaaagatggccgcttcccggccctgctgcagggagctcaaaatggaggacgcggcgctcgggagagcgggcgggtgagtcacccacacaaaggaaaagggcctttccgtcctcagccgtcgcttcatgtgactccacggagtaccgggcgccgtccaggcacctcgattagttctcgagcttttggagtacgtcgtctttaggttggggggaggggttttatgcgatggagtttccccacactgagtgggtggagactgaagttaggccagcttggcacttgatgtaattctccttggaatttgccctttttgagtttggatcttggttcattctcaagcctcagacagtggttcaaagtttttttcttccatttcaggtggatcagacggagacgggatcacttcagtgactccaggctgaacttgggcgggagccgaagatgcaaatacaaccacctattagaaccttcaaacaaacaatttcagattggaaaaacttaattgtccacgttcacgacaacatttgcaactgcaataaaccattagaacacactattgatacctgtatcaccaatccagatgaattaagattaaacaaatctactaaacaacaactacaaaaatgccttggtaccccagaagaagatacccaagaagacgttatcgatggcttcgcagatggagagctagacgcccttttcgcccaagatacagaagaagatactgggtaagaaactattctcgaaagagaaaactatttaaaataacaaccaaagaatggcaaccaaaagttataagaaagactcatgtaaagggcacctatcctttgtttctttgtacaaagcacagaattaacaataatatgatacaatatttagactctatagctccagaacactattacggaggaggaggattttcaataatgcaattttccttacaagccttatatgaagaatttataaaagcaaaaaactggtggactaatacaaactgctttttaccacttgtaagatatatgggttgctcattcaaattttataaaactgaattttatgattatattgtactaattgaaagatgttatccacttgcttgtactgatgaaatgtacttatctactcaacctagtattatgatgcttacaagaaaatgtatttttgtaccatgcaaacaaaacagcaaaggtaaaaaaccttacaaaaaagttagagtaagaccaccttcacaaatgactacaggatggcatttctcacaagacttagcaaacatgccacttgtagtactaaaaacttcagtatgcagctttgacagatattacacagacagtacagctaaatcaaccacaataggctttaaaacacttaacacacaaacatttagatatcatgactggcaggaaccacctacaacaggatacaaaccacaaaacctactatggttttatggagcagaaaacggatcaccagtagaccccaacaacacaatagtatcaaacctaatatacttaggaggcacaggaccttatgaaaaaggcacaccaataaaaacaaacataagcaattacttttcagagcctaaactgtggggaaatatatttcacgatgattatacatcaggaacatcacccgtgtttgttacaaacaaatcaccatcagaaattaaaaccgcatggaacactataaaagacttaactgttaaagctagcggtgtatttacattaagaacaattccactatggctaccttgcagatacaacccatttgcagacaaagcaaccaacaacaaaatatggctagtttctatacattcagaccacacagaatggaaaccaatagacaatccattactacaacgaacagaccttcctttatggttacttgtatggggttggcaagattggcagaaaaaaaaccaacaaacttcacaacctgatattaattatttaacagtaatatcttcaccatatatatcatgctacccaaaattagattactatgtgttactagatgaaggattttgggagggtcactcaacatacatagagtcaattacagactcagacaaaaaacactggtaccctaaaaatagatttcaaatagaaacacttaatctaatagctaacacaggtccaggaactgtaaaactaagagaaaaccaagcagcagaaggtcacatggtatatcgctttaattttaagcttggaggatgtcccgcaccgatggaaaaaatatgtgaccctagcaaacaatccaaatatcctattcccaataaccagcaacaaacaacttcgttgcagagtccagaaaacccaattcaaacctatctctacgacttcgacgaaaggaggggcctacttacagaaagagctacaaaaagaatcaaacaagatcacacatctgaaaaaactgttttgccatttacaggagcagcaacagacctccccatactccaaacaacatcacaggaggaaagctcctcggaagaagaagaagagcaacaagcggagaagaaactactccagctccgaagaaagcagcaccgactccgggagcgaatcctccagctattagacatacaaaatacataataaaacaaagtactgtaaaaattgatatgtttggagatactcatgtacctaaccgtagaatgaccccagaagaatttgaacaagaactaattgtcgctggtgtttttcgcagacctccttgttactatataaaagatagacctacttatccttatgtaccaaaacctactgatgaaaaatgtatggtaaactttgacttaaactttccttaataaaatgaatgcaattgttgttgttaacggggatcctcatcgcggccgctacgtaaattccgccccccccccccctctccctcccccccccctaacgttactggccgaagccgcttggaataaggccggtgtgcgtttgtctatatgttattttccaccatattgccgtcttttggcaatgtgagggcccggaaacctggccctgtcttcttgacgagcattcctaggggtctttcccctctcgccaaaggaatgcaaggtctgttgaatgtcgtgaaggaagcagttcctctggaagcttcttgaagacaaacaacgtctgtagcgaccctttgcaggcagcggaaccccccacctggcgacaggtgcctctgcggccaaaagccacgtgtataagatacacctgcaaaggcggcacaaccccagtgccacgttgtgagttggatagttgtggaaagagtcaaatggctctcctcaagcgtattcaacaaggggctgaaggatgcccagaaggtaccccattgtatgggatctgatctggggcctcggtgcacatgctttacatgtgtttagtcgaggttaaaaaaacgtctaggccccccgaaccacggggacgtggttttcctttgaaaaacacgatgataatatggccacaaccatggataaagttttaaacagagaggaatctttgcagctaatggaccttctaggtcttgaaaggagtgcctgggggaatattcctctgatgagaaaggcatatttaaaaaaatgcaaggagtttcatcctgataaaggaggagatgaagaaaaaatgaagaaaatgaatactctgtacaagaaaatggaagatggagtaaaatatgctcatcaacctgactttggaggcttctgggatgcaactgagattccaacctatggaactgatgaatgggagcagtggtggaatgcctttaatgaggaaaacctgttttgctcagaagaaatgccatctagtgatgatgaggctactgctgactctcaacattctactcctccaaaaaagaagagaaaggtagaagaccccaaggactttccttcagaattgctaagttttttgagtcatgctgtgtttagtaatagaactcttgcttgctttgctatttacaccacaaaggaaaaagctgcactgctatacaagaaaattatggaaaaatattctgtaacctttataagtaggcataacagttataatcataacatactgttttttcttactccacacaggcatagagtgtctgctattaataactatgctcaaaaattgtgtacctttagctttttaatttgtaaaggggttaataaggaatatttgatgtatagtgccttgactagagatccattttctgttattgaggaaagtttgccaggtgggttaaaggagcatgattttaatccagaagaagcagaggaaactaaacaagtgtcctggaagcttgtaacagagtatgcaatggaaacaaaatgtgatgatgtgttgttattgcttgggatgtacttggaatttcagtacagttttgaaatgtgtttaaaatgtattaaaaaagaacagcccagccactataagtaccatgaaaagcattatgcaaatgctgctatatttgctgacagcaaaaaccaaaaaaccatatgccaacaggctgttgatactgttttagctaaaaagcgggttgatagcctacaattaactagagaacaaatgttaacaaacagatttaatgatcttttggataggatggatataatgtttggttctacaggctctgctgacatagaagaatggatggctggagttgcttggctacactgtttgttgcccaaaatggattcagtggtgtatgactttttaaaatgcatggtgtacaacattcctaaaaaaagatactggctgtttaaaggaccaattgatagtggtaaaactacattagcagctgctttgcttgaattatgtggggggaaagctttaaatgttaatttgcccttggacaggctgaactttgagctaggagtagctattgaccagtttttagtagtttttgaggatgtaaagggcactggaggggagtccagagatttgccttcaggtcagggaattaataacctggacaatttaagggattatttggatggcagtgttaaggtaaacttagaaaagaaacacctaaataaaagaactcaaatatttccccctggaatagtcaccatgaatgagtacagtgtgcctaaaacactgcaggccagatttgtaaaacaaatagattttaggcccaaagattatttaaagcattgcctggaacgcagtgagtttttgttagaaaagagaataattcaaagtggcattgctttgcttcttatgttaatttggtacagacctgtggctgagtttgctcaaagtattcagagcagaattgtggagtggaaagagagattggacaaagagtttagtttgtcagtgtatcaaaaaatgaagtttaatgtggctatgggaattggagttttagattggctaagaaacagtgatgatgatgatgaagacagccaggaaaatgctgataaaaatgaagatggtggggagaagaacatggaagactcagggcatgaaacaggcattgattcacagtcccaaggctcatttcaggcccctcagtcctcacagtctgttcatgatcataatcagccataccacatttgtagaggttttacttgctttaaaaaacctcccacacctccccctgaacctgaaacataataagcttgcggccgcttcgagcagacatgataagatacattgatgagtttggacaaaccacaactagaatgcagtgaaaaaaatgctttatttgtgaaatttgtgatgctattgctttatttgtaaccattataagctgcaataaacaagtttcatgtctggctctagctatcccgcccctaactccgcccatcccgcccctaactccgcccagttccgcccattctccgccccatggctgactaattttttttatttatgcagaggccgaggccgcctcggcctctgagctattccagaagtagtgaggaggcttttttggaggccatcggatcccgggcccgtcgactgcagaggcctgcatgcaagcttggtgtaatcatggtcatagctgtttcctgtgtgaaattgttatccgctcacaattccacacaacatacgagccggaagcataaagtgtaaagcctggggtgcctaatgagtgagctaactcacattaattgcgttgcgctcactgcccgctttccagtcgggaaacctgtcgtgccagctgcattaatgaatcggccaacgcgcggggagaggcggtttgcgtattgggcgctcttccgcttcctcgctcactgactcgctgcgctcggtcgttcggctgcggcgagcggtatcagctcactcaaaggcggtaatacggttatccacagaatcaggggataacgcaggaaagaacatgtgagcaaaaggccagcaaaaggccaggaaccgtaaaaaggccgcgttgctggcgtttttccataggctccgcccccctgacgagcatcacaaaaatcgacgctcaagtcagaggtggcgaaacccgacaggactataaagataccaggcgtttccccctggaagctccctcgtgcgctctcctgttccgaccctgccgcttaccggatacctgtccgcctttctcccttcgggaagcgtggcgctttctcatagctcacgctgtaggtatctcagttcggtgtaggtcgttcgctccaagctgggctgtgtgcacgaaccccccgttcagcccgaccgctgcgccttatccggtaactatcgtcttgagtccaacccggtaagacacgacttatcgccactggcagcagccactggtaacaggattagcagagcgaggtatgtaggcggtgctacagagttcttgaagtggtggcctaactacggctacactagaagaacagtatttggtatctgcgctctgctgaagccagttaccttcggaaaaagagttggtagctcttgatccggcaaacaaaccaccgctggtagcggtggtttttttgtttgcaagcagcagattacgcgcagaaaaaaaggatctcaagaagatcctttgatcttttctacggggtctgacgctcagtggaacgaaaactcacgttaagggattttggtcatgagattatcaaaaaggatcttcacctagatccttttaaattaaaaatgaagttttaaatcaagcccaatctgaataatgttacaaccaattaaccaattctgattagaaaaactcatcgagcatcaaatgaaactgcaatttattcatatcaggattatcaataccatatttttgaaaaagccgtttctgtaatgaaggagaaaactcaccgaggcagttccataggatggcaagatcctggtatcggtctgcgattccgactcgtccaacatcaatacaacctattaatttcccctcgtcaaaaataaggttatcaagtgagaaatcaccatgagtgacgactgaatccggtgagaatggcaaaagtttatgcatttctttccagacttgttcaacaggccagccattacgctcgtcatcaaaatcactcgcatcaaccaaaccgttattcattcgtgattgcgcctgagcgagacgaaatacgcgatcgctgttaaaaggacaattacaaacaggaatcgaatgcaaccggcgcaggaacactgccagcgcatcaacaatattttcacctgaatcaggatattcttctaatacctggaatgctgtttttccggggatcgcagtggtgagtaaccatgcatcatcaggagtacggataaaatgcttgatggtcggaagaggcataaattccgtcagccagtttagtctgaccatctcatctgtaacatcattggcaacgctacctttgccatgtttcagaaacaactctggcgcatcgggcttcccatacaagcgatagattgtcgcacctgattgcccgacattatcgcgagcccatttatacccatataaatcagcatccatgttggaatttaatcgcggcctcgacgtttcccgttgaatatggctcataacaccccttgtattactgtttatgtaagcagacagttttattgttcatgatgatatatttttatcttgtgcaatgtaacatcagagattttgagacacgggccagagctgca

SEQ ID NO: 2006 - DNA, 9391 bp, synthetic construct
  source 1..9391: mol_type = other DNA
tcgcgcgtttcggtgatgacggtgaaaacctctgacacatgcagctcccggagacggtcacagcttgtctgtaagcggatgccgggagcagacaagcccgtcagggcgcgtcagcgggtgttggcgggtgtcggggctggcttaactatgcggcatcagagcagattgtactgagagtgcaccatatgcggtgtgaaataccgcacagatgcgtaaggagaaaataccgcatcaggcgccattcgccattcaggctgcgcaactgttgggaagggcgatcggtgcgggcctcttcgctattacgccagctggcgaaagggggatgtgctgcaaggcgattaagttgggtaacgccagggttttcccagtcacgacgttgtaaaacgacggccagagaattcgagctcggtacctcgcgaatacatctagatatggttggctccggtgcccgtcagtgggcagagcgcacatcgcccacagtccccgagaagttgtggggaggggtcggcaattgaaccggtgcctagagaaggtggcgcggggtaaactgggaaagtgatgtcgtgtactggctccgcctttttcccgagggtgggggagaaccgtatataagtgcagtagtcgccgtgaacgttctttttcgcaacgggtttgccgccagaacacaggtaagtgccgtgtgtggttcccgcgggcctggcctctttacgggttatggcccttgcgtgccttgaattacttccacctggctgcagtacgtgattcttgatcccgagcttcgggttggaagtgggtgggagagttcgaggccttgcgcttaaggagccccttcgcctcgtgcttgagttgaggcctggcctgggcgctggggccaccgcgtgcgaatctggtggcaccttcgcgcctgtctcgctgctttcgataagtctctagccatttaaaatttttgatgacctgctgcgacgctttttttctggcaagatagtcttgtaaatgcgggccaagatctgcacactggtatttcggtttttggggccgcgggcggcgacggggcccgtgcgtcccagcgcacatgttcggcgaggcggggcctgcgagcgcggccaccgagaatcggacgggggtagtctcaagctggccggcctgctctggtgcctggcctcgcgccgccgtgtatcgccccgccctgggcggcaaggctggcccggtcggcaccagttgcgtgagcggaaagatggccgcttcccggccctgctgcagggagctcaaaatggaggacgcggcgctcgggagagcgggcgggtgagtcacccacacaaaggaaaagggcctttccgtcctcagccgtcgcttcatgtgactccacggagtaccgggcgccgtccaggcacctcgattagttctcgagcttttggagtacgtcgtctttaggttggggggaggggttttatgcgatggagtttccccacactgagtgggtggagactgaagttaggccagcttggcacttgatgtaattctccttggaatttgccctttttgagtttggatcttggttcattctcaagcctcagacagtggttcaaagtttttttcttccatttcaggtggatgtttatgccgccagacggagacgggatcacttcagtgactccaggctgaacttgggcgggagccgaaggtgagtgcaaccaccgtagtctaggggcaattcgggctagttcagtatggcggaacgggcaagaaacttaaatattattattttacagatgcaaatacaaccacctattagaaccttcaaacaaacaatttcagattggaaaaacttaattgtccacgttcacgacaacatttgcaactgcaataaaccattagaacacactattgatacctgtatcaccaatccagatgaattaagattaaacaaatctactaaacaacaactacaaaaatgccttggtaccccagaagaagatacccaagaagacgttatcgatggcttcgcagatggagagctagacgcccttttcgcccaagatacagaagaagatactgggtaagaaactattctcgaaagagaaaactataataaataacaaccaaagaatggcaaccaaaagttataagaaagactcatgtaaagggcacctatcctttgtttctttgtacaaagcacagaattaacaataatatgatacaatatttagactctatagctccagaacactattacggaggaggaggattttcaataatgcaattttccttacaagccttatatgaagaatttataaaagcaaaaaactggtggactaatacaaactgctttttaccacttgtaagatatatgggttgctcattcaaattttataaaactgaattttatgattatattgtactaattgaaagatgttatccacttgcttgtactgatgaaatgtacttatctactcaacctagtattatgatgcttacaagaaaatgtatttttgtaccatgcaaacaaaacagcaaaggtaaaaaaccttacaaaaaagttagagtaagaccaccttcacaaatgactacaggatggcatttctcacaagacttagcaaacatgccacttgtagtactaaaaacttcagtatgcagctttgacagatattacacagacagtacagctaaatcaaccacaataggctttaaaacacttaacacacaaacatttagatatcatgactggcaggaaccacctacaacaggatacaaaccacaaaacctactatggttttatggagcagaaaacggatcaccagtagaccccaacaacacaatagtatcaaacctaatatacttaggaggcacaggaccttatgaaaaaggcacaccaataaaaacaaacataagcaattacttttcagagcctaaactgtggggaaatatatttcacgatgattatacatcaggaacatcacccgtgtttgttacaaacaaatcaccatcagaaattaaaaccgcatggaacactataaaagacttaactgttaaagctagcggtgtatttacattaagaacaattccactatggctaccttgcagatacaacccatttgcagacaaagcaaccaacaacaaaatatggctagtttctatacattcagaccacacagaatggaaaccaatagacaatccattactacaacgaacagaccttcctttatggttacttgtatggggttggcaagattggcagaaaaaaaaccaacaaacttcacaacctgatattaattatttaacagtaatatcttcaccatatatatcatgctacccaaaattagattactatgtgttactagatgaaggattttgggagggtcactcaacatacatagagtcaattacagactcagacaaaaaacactggtaccctaaaaatagatttcaaatagaaacacttaatctaatagctaacacaggtccaggaactgtaaaactaagagaaaaccaagcagcagaaggtcacatggtatatcgctttaattttaagcttggaggatgtcccgcaccgatggaaaaaatatgtgaccctagcaaacaatccaaatatcctattcccaataaccagcaacaaacaacttcgttgcagagtccagaaaacccaattcaaacctatctctacgacttcgacgaaaggaggggcctacttacagaaagagctacaaaaagaatcaaacaagatcacacatctgaaaaaactgttttgccatttacaggagcagcaacagacctccccatactccaaacaacatcacaggaggaaagctcctcggaagaagaagaagagcaacaagcggagaagaaactactccagctccgaagaaagcagcaccgactccgggagcgaatcctccagctattagacatacaaaatacataataaaacaaagtactgtaaaaattgatatgtttggagatactcatgtacctaaccgtagaatgaccccagaagaatttgaacaagaactaattgtcgctggtgtttttcgcagacctccttgttactatataaaagatagacctacttatccttatgtaccaaaacctactgatgaaaaatgtatggtaaactttgacttaaactttccttaataaaatgaatgcaattgttgttgttaacggggatcctcatcgcggccgctacgtaaattccgccccccccccccctctccctcccccccccctaacgttactggccgaagccgcttggaataaggccggtgtgcgtttgtctatatgttattttccaccatattgccgtcttttggcaatgtgagggcccggaaacctggccctgtcttcttgacgagcattcctaggggtctttcccctctcgccaaaggaatgcaaggtctgttgaatgtcgtgaaggaagcagttcctctggaagcttcttgaagacaaacaacgtctgtagcgaccctttgcaggcagcggaaccccccacctggcgacaggtgcctctgcggccaaaagccacgtgtataagatacacctgcaaaggcggcacaaccccagtgccacgttgtgagttggatagttgtggaaagagtcaaatggctctcctcaagcgtattcaacaaggggctgaaggatgcccagaaggtaccccattgtatgggatctgatctggggcctcggtgcacatgctttacatgtgtttagtcgaggttaaaaaaacgtctaggccccccgaaccacggggacgtggttttcctttgaaaaacacgatgataatatggccacaaccatggataaagttttaaacagagaggaatctttgcagctaatggaccttctaggtcttgaaaggagtgcctgggggaatattcctctgatgagaaaggcatatttaaaaaaatgcaaggagtttcatcctgataaaggaggagatgaagaaaaaatgaagaaaatgaatactctgtacaagaaaatggaagatggagtaaaatatgctcatcaacctgactttggaggcttctgggatgcaactgagattccaacctatggaactgatgaatgggagcagtggtggaatgcctttaatgaggaaaacctgttttgctcagaagaaatgccatctagtgatgatgaggctactgctgactctcaacattctactcctccaaaaaagaagagaaaggtagaagaccccaaggactttccttcagaattgctaagttttttgagtcatgctgtgtttagtaatagaactcttgcttgctttgctatttacaccacaaaggaaaaagctgcactgctatacaagaaaattatggaaaaatattctgtaacctttataagtaggcataacagttataatcataacatactgttttttcttactccacacaggcatagagtgtctgctattaataactatgctcaaaaattgtgtacctttagctttttaatttgtaaaggggttaataaggaatatttgatgtatagtgccttgactagagatccattttctgttattgaggaaagtttgccaggtgggttaaaggagcatgattttaatccagaagaagcagaggaaactaaacaagtgtcctggaagcttgtaacagagtatgcaatggaaacaaaatgtgatgatgtgttgttattgcttgggatgtacttggaatttcagtacagttttgaaatgtgtttaaaatgtattaaaaaagaacagcccagccactataagtaccatgaaaagcattatgcaaatgctgctatatttgctgacagcaaaaaccaaaaaaccatatgccaacaggctgttgatactgttttagctaaaaagcgggttgatagcctacaattaactagagaacaaatgttaacaaacagatttaatgatcttttggataggatggatataatgtttggttctacaggctctgctgacatagaagaatggatggctggagttgcttggctacactgtttgttgcccaaaatggattcagtggtgtatgactttttaaaatgcatggtgtacaacattcctaaaaaaagatactggctgtttaaaggaccaattgatagtggtaaaactacattagcagctgctttgcttgaattatgtggggggaaagctttaaatgttaatttgcccttggacaggctgaactttgagctaggagtagctattgaccagtttttagtagtttttgaggatgtaaagggcactggaggggagtccagagatttgccttcaggtcagggaattaataacctggacaatttaagggattatttggatggcagtgttaaggtaaacttagaaaagaaacacctaaataaaagaactcaaatatttccccctggaatagtcaccatgaatgagtacagtgtgcctaaaacactgcaggccagatttgtaaaacaaatagattttaggcccaaagattatttaaagcattgcctggaacgcagtgagtttttgttagaaaagagaataattcaaagtggcattgctttgcttcttatgttaatttggtacagacctgtggctgagtttgctcaaagtattcagagcagaattgtggagtggaaagagagattggacaaagagtttagtttgtcagtgtatcaaaaaatgaagtttaatgtggctatgggaattggagttttagattggctaagaaacagtgatgatgatgatgaagacagccaggaaaatgctgataaaaatgaagatggtggggagaagaacatggaagactcagggcatgaaacaggcattgattcacagtcccaaggctcatttcaggcccctcagtcctcacagtctgttcatgatcataatcagccataccacatttgtagaggttttacttgctttaaaaaacctcccacacctccccctgaacctgaaacataataagcttgcggccgcttcgagcagacatgataagatacattgatgagtttggacaaaccacaactagaatgcagtgaaaaaaatgctttatttgtgaaatttgtgatgctattgctttatttgtaaccattataagctgcaataaacaagtttcatgtctggctctagctatcccgcccctaactccgcccatcccgcccctaactccgcccagttccgcccattctccgccccatggctgactaattttttttatttatgcagaggccgaggccgcctcggcctctgagctattccagaagtagtgaggaggcttttttggaggccatcggatcccgggcccgtcgactgcagaggcctgcatgcaagcttggtgtaatcatggtcatagctgtttcctgtgtgaaattgttatccgctcacaattccacacaacatacgagccggaagcataaagtgtaaagcctggggtgcctaatgagtgagctaactcacattaattgcgttgcgctcactgcccgctttccagtcgggaaacctgtcgtgccagctgcattaatgaatcggccaacgcgcggggagaggcggtttgcgtattgggcgctcttccgcttcctcgctcactgactcgctgcgctcggtcgttcggctgcggcgagcggtatcagctcactcaaaggcggtaatacggttatccacagaatcaggggataacgcaggaaagaacatgtgagcaaaaggccagcaaaaggccaggaaccgtaaaaaggccgcgttgctggcgtttttccataggctccgcccccctgacgagcatcacaaaaatcgacgctcaagtcagaggtggcgaaacccgacaggactataaagataccaggcgtttccccctggaagctccctcgtgcgctctcctgttccgaccctgccgcttaccggatacctgtccgcctttctcccttcgggaagcgtggcgctttctcatagctcacgctgtaggtatctcagttcggtgtaggtcgttcgctccaagctgggctgtgtgcacgaaccccccgttcagcccgaccgctgcgccttatccggtaactatcgtcttgagtccaacccggtaagacacgacttatcgccactggcagcagccactggtaacaggattagcagagcgaggtatgtaggcggtgctacagagttcttgaagtggtggcctaactacggctacactagaagaacagtatttggtatctgcgctctgctgaagccagttaccttcggaaaaagagttggtagctcttgatccggcaaacaaaccaccgctggtagcggtggtttttttgtttgcaagcagcagattacgcgcagaaaaaaaggatctcaagaagatcctttgatcttttctacggggtctgacgctcagtggaacgaaaactcacgttaagggattttggtcatgagattatcaaaaaggatcttcacctagatccttttaaattaaaaatgaagttttaaatcaagcccaatctgaataatgttacaaccaattaaccaattctgattagaaaaactcatcgagcatcaaatgaaactgcaatttattcatatcaggattatcaataccatatttttgaaaaagccgtttctgtaatgaaggagaaaactcaccgaggcagttccataggatggcaagatcctggtatcggtctgcgattccgactcgtccaacatcaatacaacctattaatttcccctcgtcaaaaataaggttatcaagtgagaaatcaccatgagtgacgactgaatccggtgagaatggcaaaagtttatgcatttctttccagacttgttcaacaggccagccattacgctcgtcatcaaaatcactcgcatcaaccaaaccgttattcattcgtgattgcgcctgagcgagacgaaatacgcgatcgctgttaaaaggacaattacaaacaggaatcgaatgcaaccggcgcaggaacactgccagcgcatcaacaatattttcacctgaatcaggatattcttctaatacctggaatgctgtttttccggggatcgcagtggtgagtaaccatgcatcatcaggagtacggataaaatgcttgatggtcggaagaggcataaattccgtcagccagtttagtctgaccatctcatctgtaacatcattggcaacgctacctttgccatgtttcagaaacaactctggcgcatcgggcttcccatacaagcgatagattgtcgcacctgattgcccgacattatcgcgagcccatttatacccatataaatcagcatccatgttggaatttaatcgcggcctcgacgtttcccgttgaatatggctcataacaccccttgtattactgtttatgtaagcagacagttttattgttcatgatgatatatttttatcttgtgcaatgtaacatcagagattttgagacacgggccagagctgca

SEQ ID NO: 2007 - DNA, 6536 bp, synthetic construct
  source 1..6536: mol_type = other DNA
gtaagcagacagttttattgttcatgatgatatatttttatcttgtgcaatgtaacatcagagattttgagacacgggccagagctgcatcgcgcgtttcggtgatgacggtgaaaacctctgacacatgcagctcccggacgtcattgtcgatatggcgtctctcggtatggttggctccggtgcccgtcagtgggcagagcgcacatcgcccacagtccccgagaagttgtggggaggggtcggcaattgaaccggtgcctagagaaggtggcgcggggtaaactgggaaagtgatgtcgtgtactggctccgcctttttcccgagggtgggggagaaccgtatataagtgcagtagtcgccgtgaacgttctttttcgcaacgggtttgccgccagaacacaggtaagtgccgtgtgtggttcccgcgggcctggcctctttacgggttatggcccttgcgtgccttgaattacttccacctggctgcagtacgtgattcttgatcccgagcttcgggttggaagtgggtgggagagttcgaggccttgcgcttaaggagccccttcgcctcgtgcttgagttgaggcctggcctgggcgctggggccgccgcgtgcgaatctggtggcaccttcgcgcctgtctcgctgctttcgataagtctctagccatttaaaatttttgatgacctgctgcgacgctttttttctggcaagatagtcttgtaaatgcgggccaagatctgcacactggtatttcggtttttggggccgcgggcggcgacggggcccgtgcgtcccagcgcacatgttcggcgaggcggggcctgcgagcgcggccaccgagaatcggacgggggtagtctcaagctggccggcctgctctggtgcctggcctcgcgccgccgtgtatcgccccgccctgggcggcaaggctggcccggtcggcaccagttgcgtgagcggaaagatggccgcttcccggccctgctgcagggagctcaaaatggaggacgcggcgctcgggagagcgggcgggtgagtcacccacacaaaggaaaagggcctttccgtcctcagccgtcgcttcatgtgactccacggagtaccgggcgccgtccaggcacctcgattagttctcgagcttttggagtacgtcgtctttaggttggggggaggggttttatgcgatggagtttccccacactgagtgggtggagactgaagttaggccagcttggcacttgatgtaattctccttggaatttgccctttttgagtttggatcttggttcattctcaagcctcagacagtggttcaaagtttttttcttccatttcaggtggatctacaaaaaagcagatccaccggtcgccaccatgccttggtacccgaggcgcagatacccccggcggcggtaccgctggttgcggcgatggcgcgcgcggcggcctttccggccgcggtatcgccggcgctactggtcgccggagaatccgattcagacttacctttacgatttcgacgagcggagaggactcctcaccgagcgggccaccaagcggattaagcaggaccacacgtccgaaaagaccgtgctgcctttcaccggggccgcgaccgatctgcccattttgcaaacgaccagtcaggaagagagctcctccgaggaagaagaggaacagcaggcagagaaaaagctgcttcagctgagaagaaagcagcacaggctgcgggagaggatcctccagcttctggacatccagaacacttaataacttgtacaaagtggtacgcgtgaagttccccctctccctcccccccccctaacgttactggccgaagccgcttggaataaggccggtgtgcgtttgtctatatgttattttccaccatattgccgtcttttggcaatgtgagggcccggaaacctggccctgtcttcttgacgagcattcctaggggtctttcccctctcgccaaaggaatgcaaggtctgttgaatgtcgtgaaggaagcagttcctctggaagcttcttgaagacaaacaacgtctgtagcgaccctttgcaggcagcggaaccccccacctggcgacaggtgcctctgcggccaaaagccacgtgtataagatacacctgcaaaggcggcacaaccccagtgccacgttgtgagttggatagttgtggaaagagtcaaatggctctcctcaagcgtattcaacaaggggctgaaggatgcccagaaggtaccccattgtatgggatctgatctggggcctcggtgcacatgctttacatgtgtttagtcgaggttaaaaaaacgtctaggccccccgaaccacggggacgtggttttcctttgaaaaacacgatgataatatggccacaaccatggataaagttttaaacagagaggaatctttgcagctaatggaccttctaggtcttgaaaggagtgcctgggggaatattcctctgatgagaaaggcatatttaaaaaaatgcaaggagtttcatcctgataaaggaggagatgaagaaaaaatgaagaaaatgaatactctgtacaagaaaatggaagatggagtaaaatatgctcatcaacctgactttggaggcttctgggatgcaactgagattccaacctatggaactgatgaatgggagcagtggtggaatgcctttaatgaggaaaacctgttttgctcagaagaaatgccatctagtgatgatgaggctactgctgactctcaacattctactcctccaaaaaagaagagaaaggtagaagaccccaaggactttccttcagaattgctaagttttttgagtcatgctgtgtttagtaatagaactcttgcttgctttgctatttacaccacaaaggaaaaagctgcactgctatacaagaaaattatggaaaaatattctgtaacctttataagtaggcataacagttataatcataacatactgttttttcttactccacacaggcatagagtgtctgctattaataactatgctcaaaaattgtgtacctttagctttttaatttgtaaaggggttaataaggaatatttgatgtatagtgccttgactagagatccattttctgttattgaggaaagtttgccaggtgggttaaaggagcatgattttaatccagaagaagcagaggaaactaaacaagtgtcctggaagcttgtaacagagtatgcaatggaaacaaaatgtgatgatgtgttgttattgcttgggatgtacttggaatttcagtacagttttgaaatgtgtttaaaatgtattaaaaaagaacagcccagccactataagtaccatgaaaagcattatgcaaatgctgctatatttgctgacagcaaaaaccaaaaaaccatatgccaacaggctgttgatactgttttagctaaaaagcgggttgatagcctacaattaactagagaacaaatgttaacaaacagatttaatgatcttttggataggatggatataatgtttggttctacaggctctgctgacatagaagaatggatggctggagttgcttggctacactgtttgttgcccaaaatggattcagtggtgtatgactttttaaaatgcatggtgtacaacattcctaaaaaaagatactggctgtttaaaggaccaattgatagtggtaaaactacattagcagctgctttgcttgaattatgtggggggaaagctttaaatgttaatttgcccttggacaggctgaactttgagctaggagtagctattgaccagtttttagtagtttttgaggatgtaaagggcactggaggggagtccagagatttgccttcaggtcagggaattaataacctggacaatttaagggattatttggatggcagtgttaaggtaaacttagaaaagaaacacctaaataaaagaactcaaatatttccccctggaatagtcaccatgaatgagtacagtgtgcctaaaacactgcaggccagatttgtaaaacaaatagattttaggcccaaagattatttaaagcattgcctggaacgcagtgagtttttgttagaaaagagaataattcaaagtggcattgctttgcttcttatgttaatttggtacagacctgtggctgagtttgctcaaagtattcagagcagaattgtggagtggaaagagagattggacaaagagtttagtttgtcagtgtatcaaaaaatgaagtttaatgtggctatgggaattggagttttagattggctaagaaacagtgatgatgatgatgaagacagccaggaaaatgctgataaaaatgaagatggtggggagaagaacatggaagactcagggcatgaaacaggcattgattcacagtcccaaggctcatttcaggcccctcagtcctcacagtctgttcatgatcataatcagccataccacatttgtagaggttttacttgctttaaaaaacctcccacacctccccctgaacctgaaacataataagcttgcggccgcttcgagcagacatgataagatacattgatgagtttggacaaaccacaactagaatgcagtgaaaaaaatgctttatttgtgaaatttgtgatgctattgctttatttgtaaccattataagctgcaataaacaagtttcatgtctggctctagctatcccgcccctaactccgcccatcccgcccctaactccgcccagttccgcccattctccgccccatggctgactaattttttttatttatgcagaggccgaggccgcctcggcctctgagctattccagaagtagtgaggaggcttttttggaggcctgaatctgtgagacgtatcattgtcacatgtgagcaaaaggccagcaaaaggccaggaaccgtaaaaaggccgcgttgctggcgtttttccataggctccgcccccctgacgagcatcacaaaaatcgacgctcaagtcagaggtggcgaaacccgacaggactataaagataccaggcgtttccccctggaagctccctcgtgcgctctcctgttccgaccctgccgcttaccggatacctgtccgcctttctcccttcgggaagcgtggcgctttctcatagctcacgctgtaggtatctcagttcggtgtaggtcgttcgctccaagctgggctgtgtgcacgaaccccccgttcagcccgaccgctgcgccttatccggtaactatcgtcttgagtccaacccggtaagacacgacttatcgccactggcagcagccactggtaacaggattagcagagcgaggtatgtaggcggtgctacagagttcttgaagtggtggcctaactacggctacactagaagaacagtatttggtatctgcgctctgctgaagccagttaccttcggaaaaagagttggtagctcttgatccggcaaacaaaccaccgctggtagcggtggtttttttgtttgcaagcagcagattacgcgcagaaaaaaaggatctcaagaagatcctttgatcttttctacggggtctgacgctcagtggaacgaaaactcacgttaagggattttggtcatgagattatcaaaaaggatcttcacctagatccttttaaattaaaaatgaagttttaaatcaagcccaatctgaataatgttacaaccaattaaccaattctgattagaaaaactcatcgagcatcaaatgaaactgcaatttattcatatcaggattatcaataccatatttttgaaaaagccgtttctgtaatgaaggagaaaactcaccgaggcagttccataggatggcaagatcctggtatcggtctgcgattccgactcgtccaacatcaatacaacctattaatttcccctcgtcaaaaataaggttatcaagtgagaaatcaccatgagtgacgactgaatccggtgagaatggcaaaagtttatgcatttctttccagacttgttcaacaggccagccattacgctcgtcatcaaaatcactcgcatcaaccaaaccgttattcattcgtgattgcgcctgagcgagacgaaatacgcgatcgctgttaaaaggacaattacaaacaggaatcgaatgcaaccggcgcaggaacactgccagcgcatcaacaatattttcacctgaatcaggatattcttctaatacctggaatgctgtttttccggggatcgcagtggtgagtaaccatgcatcatcaggagtacggataaaatgcttgatggtcggaagaggcataaattccgtcagccagtttagtctgaccatctcatctgtaacatcattggcaacgctacctttgccatgtttcagaaacaactctggcgcatcgggcttcccatacaagcgatagattgtcgcacctgattgcccgacattatcgcgagcccatttatacccatataaatcagcatccatgttggaatttaatcgcggcctcgacgtttcccgttgaatatggctcataacaccccttgtattactgtttat

SEQ ID NO: 2008 - DNA, 9418 bp, synthetic construct
  source 1..9418: mol_type = other DNA
tcgcgcgtttcggtgatgacggtgaaaacctctgacacatgcagctcccggagacggtcacagcttgtctgtaagcggatgccgggagcagacaagcccgtcagggcgcgtcagcgggtgttggcgggtgtcggggctggcttaactatgcggcatcagagcagattgtactgagagtgcaccatatgcggtgtgaaataccgcacagatgcgtaaggagaaaataccgcatcaggcgccattcgccattcaggctgcgcaactgttgggaagggcgatcggtgcgggcctcttcgctattacgccagctggcgaaagggggatgtgctgcaaggcgattaagttgggtaacgccagggttttcccagtcacgacgttgtaaaacgacggccagagaattcgagctcggtacctcgcgaatacatctagatatggttggctccggtgcccgtcagtgggcagagcgcacatcgcccacagtccccgagaagttgtggggaggggtcggcaattgaaccggtgcctagagaaggtggcgcggggtaaactgggaaagtgatgtcgtgtactggctccgcctttttcccgagggtgggggagaaccgtatataagtgcagtagtcgccgtgaacgttctttttcgcaacgggtttgccgccagaacacaggtaagtgccgtgtgtggttcccgcgggcctggcctctttacgggttatggcccttgcgtgccttgaattacttccacctggctgcagtacgtgattcttgatcccgagcttcgggttggaagtgggtgggagagttcgaggccttgcgcttaaggagccccttcgcctcgtgcttgagttgaggcctggcctgggcgctggggccaccgcgtgcgaatctggtggcaccttcgcgcctgtctcgctgctttcgataagtctctagccatttaaaatttttgatgacctgctgcgacgctttttttctggcaagatagtcttgtaaatgcgggccaagatctgcacactggtatttcggtttttggggccgcgggcggcgacggggcccgtgcgtcccagcgcacatgttcggcgaggcggggcctgcgagcgcggccaccgagaatcggacgggggtagtctcaagctggccggcctgctctggtgcctggcctcgcgccgccgtgtatcgccccgccctgggcggcaaggctggcccggtcggcaccagttgcgtgagcggaaagatggccgcttcccggccctgctgcagggagctcaaaatggaggacgcggcgctcgggagagcgggcgggtgagtcacccacacaaaggaaaagggcctttccgtcctcagccgtcgcttcatgtgactccacggagtaccgggcgccgtccaggcacctcgattagttctcgagcttttggagtacgtcgtctttaggttggggggaggggttttatgcgatggagtttccccacactgagtgggtggagactgaagttaggccagcttggcacttgatgtaattctccttggaatttgccctttttgagtttggatcttggttcattctcaagcctcagacagtggttcaaagtttttttcttccatttcaggtggatgtttatgccgctagacggagaacgcatcagttactgactgcggactgaacttgggcgggtgccgaaggtgagtgaaaccaccgaagtcaaggggcaattcgggctagttcagtctagcggaacgggcaagaaacttaaaattattttatttttcagatgagcgactgctttaaaccaacatgctacaacaacaaaacaaagcaaactcactggattaataacctgcatttaacccacgacctgatctgcttctgcccaacaccaactagacacttattactagctttagcagaacaacaagaaacaattgaagtgtctaaacaagaaaaagaaaaaataacaagatgccttattactacagaagaagacggtacaactacagacgtcctagatggtatggacgaggttggattagacgcccttttcgcagaagatttcgaagaaaaagaagggtaagacctacttatactactattcctctaaagcaatggcaaccgccataataaagaacatgctatataaaaggacaagactgtttaatatactatagcaacttaagactgggaatgaatagtacaatgtatgaaaaaagtattgtacctgtacattggccgggagggggttctttttctgtaagcatgttaactttagatgccttgtatgatatacataaactttgtagaaactggtggacatccacaaaccaagacttaccactagtaagatataaaggatgcaaaataacattttatcaaagcacatttacagactacatagtaagaatacatacagaactaccagctaacagtaacaaactaacatacccaaacacacatccactaatgatgatgatgtctaagtacaaacacattatacctagtagacaaacaagaagaaaaaagaaaccatacacaaaaatatttgtaaaaccacctccgcaatttgaaaacaaatggtactttgctacagacctctacaaaattccattactacaaatacactgcacagcatgcaacttacaaaacccatttgtaaaaccagacaaattatcaaacaatgttacattatggtcactaaacaccataagcatacaaaatagaaacatgtcagtggatcaaggacaatcatggccatttaaaatactaggaacacaaagcttttatttttacttttacaccggagcaaacctaccaggtgacacaacacaaataccagtagcagacctattaccactaacaaacccaagaataaacagaccaggacaatcactaaatgaggcaaaaattacagaccatattactttcacagaatacaaaaacaaatttacaaattattggggtaacccatttaataaacacattcaagaacacctagatatgatactatactcactaaaaagtccagaagcaataaaaaacgaatggacaacagaaaacatgaaatggaaccaattaaacaatgcaggaacaatggcattaacaccatttaacgagccaatattcacacaaatacaatataacccagatagagacacaggagaagacactcaattatacctactctctaacgctacaggaacaggatgggacccaccaggaattccagaattaatactagaaggatttccactatggttaatatattggggatttgcagactttcaaaaaaacctaaaaaaagtaacaaacatagacacaaattacatgttagtagcaaaaacaaaatttacacaaaaacctggcacattctacttagtaatactaaatgacacctttgtagaaggcaatagcccatatgaaaaacaacctttacctgaagacaacattaaatggtacccacaagtacaataccaattagaagcacaaaacaaactactacaaactgggccatttacaccaaacatacaaggacaactatcagacaatatatcaatgttttataaattttactttaaatggggaggaagcccaccaaaagcaattaatgttgaaaatcctgcccaccagattcaatatcccataccccgtaacgagcatgaaacaacttcgttacagagtccaggggaagccccagaatccatcttatactccttcgactatagacacgggaactacacaacaacagctttgtcacgaattagccaagactgggcacttaaagacactgtttctaaaattacagagccagatcgacagcaactgctcaaacaagccctcgaatgcctgcaaatctcggaagaaacgcaggagaaaaaagaaaaagaagtacagcagctcatcagcaacctcagacagcagcagcagctgtacagagagcgaataatatcattattaaaggaccaataacttttaactgtgtaaaaaaggtgaaattgtttgatgataaaccaaaaaaccgtagatttacacctgaggaatttgaaactgagttacaaatagcaaaatggttaaagaggcccccaagatcctttgtaaatgatcctcccttttacccatggttaccacctgaacctgttgtaaactttaagcttaattttactgaataataaaatgaatgcaattgttgttgttaacggggatcctcatcgcggccgctacgtaaattccgccccccccccccctctccctcccccccccctaacgttactggccgaagccgcttggaataaggccggtgtgcgtttgtctatatgttattttccaccatattgccgtcttttggcaatgtgagggcccggaaacctggccctgtcttcttgacgagcattcctaggggtctttcccctctcgccaaaggaatgcaaggtctgttgaatgtcgtgaaggaagcagttcctctggaagcttcttgaagacaaacaacgtctgtagcgaccctttgcaggcagcggaaccccccacctggcgacaggtgcctctgcggccaaaagccacgtgtataagatacacctgcaaaggcggcacaaccccagtgccacgttgtgagttggatagttgtggaaagagtcaaatggctctcctcaagcgtattcaacaaggggctgaaggatgcccagaaggtaccccattgtatgggatctgatctggggcctcggtgcacatgctttacatgtgtttagtcgaggttaaaaaaacgtctaggccccccgaaccacggggacgtggttttcctttgaaaaacacgatgataatatggccacaaccatggataaagttttaaacagagaggaatctttgcagctaatggaccttctaggtcttgaaaggagtgcctgggggaatattcctctgatgagaaaggcatatttaaaaaaatgcaaggagtttcatcctgataaaggaggagatgaagaaaaaatgaagaaaatgaatactctgtacaagaaaatggaagatggagtaaaatatgctcatcaacctgactttggaggcttctgggatgcaactgagattccaacctatggaactgatgaatgggagcagtggtggaatgcctttaatgaggaaaacctgttttgctcagaagaaatgccatctagtgatgatgaggctactgctgactctcaacattctactcctccaaaaaagaagagaaaggtagaagaccccaaggactttccttcagaattgctaagttttttgagtcatgctgtgtttagtaatagaactcttgcttgctttgctatttacaccacaaaggaaaaagctgcactgctatacaagaaaattatggaaaaatattctgtaacctttataagtaggcataacagttataatcataacatactgttttttcttactccacacaggcatagagtgtctgctattaataactatgctcaaaaattgtgtacctttagctttttaatttgtaaaggggttaataaggaatatttgatgtatagtgccttgactagagatccattttctgttattgaggaaagtttgccaggtgggttaaaggagcatgattttaatccagaagaagcagaggaaactaaacaagtgtcctggaagcttgtaacagagtatgcaatggaaacaaaatgtgatgatgtgttgttattgcttgggatgtacttggaatttcagtacagttttgaaatgtgtttaaaatgtattaaaaaagaacagcccagccactataagtaccatgaaaagcattatgcaaatgctgctatatttgctgacagcaaaaaccaaaaaaccatatgccaacaggctgttgatactgttttagctaaaaagcgggttgatagcctacaattaactagagaacaaatgttaacaaacagatttaatgatcttttggataggatggatataatgtttggttctacaggctctgctgacatagaagaatggatggctggagttgcttggctacactgtttgttgcccaaaatggattcagtggtgtatgactttttaaaatgcatggtgtacaacattcctaaaaaaagatactggctgtttaaaggaccaattgatagtggtaaaactacattagcagctgctttgcttgaattatgtggggggaaagctttaaatgttaatttgcccttggacaggctgaactttgagctaggagtagctattgaccagtttttagtagtttttgaggatgtaaagggcactggaggggagtccagagatttgccttcaggtcagggaattaataacctggacaatttaagggattatttggatggcagtgttaaggtaaacttagaaaagaaacacctaaataaaagaactcaaatatttccccctggaatagtcaccatgaatgagtacagtgtgcctaaaacactgcaggccagatttgtaaaacaaatagattttaggcccaaagattatttaaagcattgcctggaacgcagtgagtttttgttagaaaagagaataattcaaagtggcattgctttgcttcttatgttaatttggtacagacctgtggctgagtttgctcaaagtattcagagcagaattgtggagtggaaagagagattggacaaagagtttagtttgtcagtgtatcaaaaaatgaagtttaatgtggctatgggaattggagttttagattggctaagaaacagtgatgatgatgatgaagacagccaggaaaatgctgataaaaatgaagatggtggggagaagaacatggaagactcagggcatgaaacaggcattgattcacagtcccaaggctcatttcaggcccctcagtcctcacagtctgttcatgatcataatcagccataccacatttgtagaggttttacttgctttaaaaaacctcccacacctccccctgaacctgaaacataataagcttgcggccgcttcgagcagacatgataagatacattgatgagtttggacaaaccacaactagaatgcagtgaaaaaaatgctttatttgtgaaatttgtgatgctattgctttatttgtaaccattataagctgcaataaacaagtttcatgtctggctctagctatcccgcccctaactccgcccatcccgcccctaactccgcccagttccgcccattctccgccccatggctgactaattttttttatttatgcagaggccgaggccgcctcggcctctgagctattccagaagtagtgaggaggcttttttggaggccatcggatcccgggcccgtcgactgcagaggcctgcatgcaagcttggtgtaatcatggtcatagctgtttcctgtgtgaaattgttatccgctcacaattccacacaacatacgagccggaagcataaagtgtaaagcctggggtgcctaatgagtgagctaactcacattaattgcgttgcgctcactgcccgctttccagtcgggaaacctgtcgtgccagctgcattaatgaatcggccaacgcgcggggagaggcggtttgcgtattgggcgctcttccgcttcctcgctcactgactcgctgcgctcggtcgttcggctgcggcgagcggtatcagctcactcaaaggcggtaatacggttatccacagaatcaggggataacgcaggaaagaacatgtgagcaaaaggccagcaaaaggccaggaaccgtaaaaaggccgcgttgctggcgtttttccataggctccgcccccctgacgagcatcacaaaaatcgacgctcaagtcagaggtggcgaaacccgacaggactataaagataccaggcgtttccccctggaagctccctcgtgcgctctcctgttccgaccctgccgcttaccggatacctgtccgcctttctcccttcgggaagcgtggcgctttctcatagctcacgctgtaggtatctcagttcggtgtaggtcgttcgctccaagctgggctgtgtgcacgaaccccccgttcagcccgaccgctgcgccttatccggtaactatcgtcttgagtccaacccggtaagacacgacttatcgccactggcagcagccactggtaacaggattagcagagcgaggtatgtaggcggtgctacagagttcttgaagtggtggcctaactacggctacactagaagaacagtatttggtatctgcgctctgctgaagccagttaccttcggaaaaagagttggtagctcttgatccggcaaacaaaccaccgctggtagcggtggtttttttgtttgcaagcagcagattacgcgcagaaaaaaaggatctcaagaagatcctttgatcttttctacggggtctgacgctcagtggaacgaaaactcacgttaagggattttggtcatgagattatcaaaaaggatcttcacctagatccttttaaattaaaaatgaagttttaaatcaagcccaatctgaataatgttacaaccaattaaccaattctgattagaaaaactcatcgagcatcaaatgaaactgcaatttattcatatcaggattatcaataccatatttttgaaaaagccgtttctgtaatgaaggagaaaactcaccgaggcagttccataggatggcaagatcctggtatcggtctgcgattccgactcgtccaacatcaatacaacctattaatttcccctcgtcaaaaataaggttatcaagtgagaaatcaccatgagtgacgactgaatccggtgagaatggcaaaagtttatgcatttctttccagacttgttcaacaggccagccattacgctcgtcatcaaaatcactcgcatcaaccaaaccgttattcattcgtgattgcgcctgagcgagacgaaatacgcgatcgctgttaaaaggacaattacaaacaggaatcgaatgcaaccggcgcaggaacactgccagcgcatcaacaatattttcacctgaatcaggatattcttctaatacctggaatgctgtttttccggggatcgcagtggtgagtaaccatgcatcatcaggagtacggataaaatgcttgatggtcggaagaggcataaattccgtcagccagtttagtctgaccatctcatctgtaacatcattggcaacgctacctttgccatgtttcagaaacaactctggcgcatcgggcttcccatacaagcgatagattgtcgcacctgattgcccgacattatcgcgagcccatttatacccatataaatcagcatccatgttggaatttaatcgcggcctcgacgtttcccgttgaatatggctcataacaccccttgtattactgtttatgtaagcagacagttttattgttcatgatgatatatttttatcttgtgcaatgtaacatcagagattttgagacacgggccagagctgca

SEQ ID NO: 2009 - DNA, 6588 bp, synthetic construct
  source 1..6588: mol_type = other DNA
gtaagcagacagttttattgttcatgatgatatatttttatcttgtgcaatgtaacatcagagattttgagacacgggccagagctgcatcgcgcgtttcggtgatgacggtgaaaacctctgacacatgcagctcccggacgtcattgtcgatatggcgtctctcggtatggttggctccggtgcccgtcagtgggcagagcgcacatcgcccacagtccccgagaagttgtggggaggggtcggcaattgaaccggtgcctagagaaggtggcgcggggtaaactgggaaagtgatgtcgtgtactggctccgcctttttcccgagggtgggggagaaccgtatataagtgcagtagtcgccgtgaacgttctttttcgcaacgggtttgccgccagaacacaggtaagtgccgtgtgtggttcccgcgggcctggcctctttacgggttatggcccttgcgtgccttgaattacttccacctggctgcagtacgtgattcttgatcccgagcttcgggttggaagtgggtgggagagttcgaggccttgcgcttaaggagccccttcgcctcgtgcttgagttgaggcctggcctgggcgctggggccgccgcgtgcgaatctggtggcaccttcgcgcctgtctcgctgctttcgataagtctctagccatttaaaatttttgatgacctgctgcgacgctttttttctggcaagatagtcttgtaaatgcgggccaagatctgcacactggtatttcggtttttggggccgcgggcggcgacggggcccgtgcgtcccagcgcacatgttcggcgaggcggggcctgcgagcgcggccaccgagaatcggacgggggtagtctcaagctggccggcctgctctggtgcctggcctcgcgccgccgtgtatcgccccgccctgggcggcaaggctggcccggtcggcaccagttgcgtgagcggaaagatggccgcttcccggccctgctgcagggagctcaaaatggaggacgcggcgctcgggagagcgggcgggtgagtcacccacacaaaggaaaagggcctttccgtcctcagccgtcgcttcatgtgactccacggagtaccgggcgccgtccaggcacctcgattagttctcgagcttttggagtacgtcgtctttaggttggggggaggggttttatgcgatggagtttccccacactgagtgggtggagactgaagttaggccagcttggcacttgatgtaattctccttggaatttgccctttttgagtttggatcttggttcattctcaagcctcagacagtggttcaaagtttttttcttccatttcaggtggatctacaaaaaagcagatccaccggtcgccaccatgccatactactacagacgcagacgctacaactaccgccgccctcgttggtacggaagaggttggattcggcggcccttccgccggcggttcaggcgcaagcggcgcattcagtaccctatcccgagaaacgagcacgaaacaacaagcctgcagtcccccggagaggcccccgagtccattctgtactctttcgactaccgccatggaaactacaccaccactgccctgtcccggatcagccaggattgggccctgaaagacaccgtgtcgaagatcaccgagcccgacagacagcagctgctcaaacaagcccttgagtgtctccagattagcgaagagactcaggaaaagaaagaaaaggaggtgcagcaactgatctccaacctccggcagcagcagcaactgtaccgcgaacggattatctcactgctgaaggaccagtaaataacttgtacaaagtggtacgcgtgaagttccccctctccctcccccccccctaacgttactggccgaagccgcttggaataaggccggtgtgcgtttgtctatatgttattttccaccatattgccgtcttttggcaatgtgagggcccggaaacctggccctgtcttcttgacgagcattcctaggggtctttcccctctcgccaaaggaatgcaaggtctgttgaatgtcgtgaaggaagcagttcctctggaagcttcttgaagacaaacaacgtctgtagcgaccctttgcaggcagcggaaccccccacctggcgacaggtgcctctgcggccaaaagccacgtgtataagatacacctgcaaaggcggcacaaccccagtgccacgttgtgagttggatagttgtggaaagagtcaaatggctctcctcaagcgtattcaacaaggggctgaaggatgcccagaaggtaccccattgtatgggatctgatctggggcctcggtgcacatgctttacatgtgtttagtcgaggttaaaaaaacgtctaggccccccgaaccacggggacgtggttttcctttgaaaaacacgatgataatatggccacaaccatggataaagttttaaacagagaggaatctttgcagctaatggaccttctaggtcttgaaaggagtgcctgggggaatattcctctgatgagaaaggcatatttaaaaaaatgcaaggagtttcatcctgataaaggaggagatgaagaaaaaatgaagaaaatgaatactctgtacaagaaaatggaagatggagtaaaatatgctcatcaacctgactttggaggcttctgggatgcaactgagattccaacctatggaactgatgaatgggagcagtggtggaatgcctttaatgaggaaaacctgttttgctcagaagaaatgccatctagtgatgatgaggctactgctgactctcaacattctactcctccaaaaaagaagagaaaggtagaagaccccaaggactttccttcagaattgctaagttttttgagtcatgctgtgtttagtaatagaactcttgcttgctttgctatttacaccacaaaggaaaaagctgcactgctatacaagaaaattatggaaaaatattctgtaacctttataagtaggcataacagttataatcataacatactgttttttcttactccacacaggcatagagtgtctgctattaataactatgctcaaaaattgtgtacctttagctttttaatttgtaaaggggttaataaggaatatttgatgtatagtgccttgactagagatccattttctgttattgaggaaagtttgccaggtgggttaaaggagcatgattttaatccagaagaagcagaggaaactaaacaagtgtcctggaagcttgtaacagagtatgcaatggaaacaaaatgtgatgatgtgttgttattgcttgggatgtacttggaatttcagtacagttttgaaatgtgtttaaaatgtattaaaaaagaacagcccagccactataagtaccatgaaaagcattatgcaaatgctgctatatttgctgacagcaaaaaccaaaaaaccatatgccaacaggctgttgatactgttttagctaaaaagcgggttgatagcctacaattaactagagaacaaatgttaacaaacagatttaatgatcttttggataggatggatataatgtttggttctacaggctctgctgacatagaagaatggatggctggagttgcttggctacactgtttgttgcccaaaatggattcagtggtgtatgactttttaaaatgcatggtgtacaacattcctaaaaaaagatactggctgtttaaaggaccaattgatagtggtaaaactacattagcagctgctttgcttgaattatgtggggggaaagctttaaatgttaatttgcccttggacaggctgaactttgagctaggagtagctattgaccagtttttagtagtttttgaggatgtaaagggcactggaggggagtccagagatttgccttcaggtcagggaattaataacctggacaatttaagggattatttggatggcagtgttaaggtaaacttagaaaagaaacacctaaataaaagaactcaaatatttccccctggaatagtcaccatgaatgagtacagtgtgcctaaaacactgcaggccagatttgtaaaacaaatagattttaggcccaaagattatttaaagcattgcctggaacgcagtgagtttttgttagaaaagagaataattcaaagtggcattgctttgcttcttatgttaatttggtacagacctgtggctgagtttgctcaaagtattcagagcagaattgtggagtggaaagagagattggacaaagagtttagtttgtcagtgtatcaaaaaatgaagtttaatgtggctatgggaattggagttttagattggctaagaaacagtgatgatgatgatgaagacagccaggaaaatgctgataaaaatgaagatggtggggagaagaacatggaagactcagggcatgaaacaggcattgattcacagtcccaaggctcatttcaggcccctcagtcctcacagtctgttcatgatcataatcagccataccacatttgtagaggttttacttgctttaaaaaacctcccacacctccccctgaacctgaaacataataagcttgcggccgcttcgagcagacatgataagatacattgatgagtttggacaaaccacaactagaatgcagtgaaaaaaatgctttatttgtgaaatttgtgatgctattgctttatttgtaaccattataagctgcaataaacaagtttcatgtctggctctagctatcccgcccctaactccgcccatcccgcccctaactccgcccagttccgcccattctccgccccatggctgactaattttttttatttatgcagaggccgaggccgcctcggcctctgagctattccagaagtagtgaggaggcttttttggaggcctgaatctgtgagacgtatcattgtcacatgtgagcaaaaggccagcaaaaggccaggaaccgtaaaaaggccgcgttgctggcgtttttccataggctccgcccccctgacgagcatcacaaaaatcgacgctcaagtcagaggtggcgaaacccgacaggactataaagataccaggcgtttccccctggaagctccctcgtgcgctctcctgttccgaccctgccgcttaccggatacctgtccgcctttctcccttcgggaagcgtggcgctttctcatagctcacgctgtaggtatctcagttcggtgtaggtcgttcgctccaagctgggctgtgtgcacgaaccccccgttcagcccgaccgctgcgccttatccggtaactatcgtcttgagtccaacccggtaagacacgacttatcgccactggcagcagccactggtaacaggattagcagagcgaggtatgtaggcggtgctacagagttcttgaagtggtggcctaactacggctacactagaagaacagtatttggtatctgcgctctgctgaagccagttaccttcggaaaaagagttggtagctcttgatccggcaaacaaaccaccgctggtagcggtggtttttttgtttgcaagcagcagattacgcgcagaaaaaaaggatctcaagaagatcctttgatcttttctacggggtctgacgctcagtggaacgaaaactcacgttaagggattttggtcatgagattatcaaaaaggatcttcacctagatccttttaaattaaaaatgaagttttaaatcaagcccaatctgaataatgttacaaccaattaaccaattctgattagaaaaactcatcgagcatcaaatgaaactgcaatttattcatatcaggattatcaataccatatttttgaaaaagccgtttctgtaatgaaggagaaaactcaccgaggcagttccataggatggcaagatcctggtatcggtctgcgattccgactcgtccaacatcaatacaacctattaatttcccctcgtcaaaaataaggttatcaagtgagaaatcaccatgagtgacgactgaatccggtgagaatggcaaaagtttatgcatttctttccagacttgttcaacaggccagccattacgctcgtcatcaaaatcactcgcatcaaccaaaccgttattcattcgtgattgcgcctgagcgagacgaaatacgcgatcgctgttaaaaggacaattacaaacaggaatcgaatgcaaccggcgcaggaacactgccagcgcatcaacaatattttcacctgaatcaggatattcttctaatacctggaatgctgtttttccggggatcgcagtggtgagtaaccatgcatcatcaggagtacggataaaatgcttgatggtcggaagaggcataaattccgtcagccagtttagtctgaccatctcatctgtaacatcattggcaacgctacctttgccatgtttcagaaacaactctggcgcatcgggcttcccatacaagcgatagattgtcgcacctgattgcccgacattatcgcgagcccatttatacccatataaatcagcatccatgttggaatttaatcgcggcctcgacgtttcccgttgaatatggctcataacaccccttgtattactgtttat

SEQ ID NO: 2010-2499 - skipped (490 entries)

SEQ ID NO: 2500 - protein, 351 aa, synthetic construct
MAVAPAPDTAPVPDVDSRGAILRRQYNLSTSPLTSTIATGTNLVLYAAPLSSLLPLQDGTNTHIMATEASNYAQYRVVRATIRYRPLVPSAVGGYAISISFWPQTTTTPTSVDMNSITSTDVRILVQPGIASELVIPSERLHYRNQGWRSVETSGVAEEEATSGLVMLCIHGSPVNSYTNTPYTGALGLLDFALELEFRNLTPGNTNTRVSRYSSSARHKLRRGPDGTAELTTTAATRFMKDLHFTGTNDVGEVGRGIALTLFNLADTLLGGLPTELISSAGGQLFYSRPVVSANGEPTVKLYTSVENAQQDKGIAIPHDIDLGESRVVIQDYDNQHEQDRPTPSPAPSRP

SEQ ID NO: 2501 - protein, 138 aa, synthetic construct
LNTTYIQNRDWGDRNKTYYCQTLGTQRYFLYGTHSTAQNINDIKLQELIPLTNTQDYVQGFDWTEKDKHNITTYKEFLTKGAGNPFHAEWITAQNPVIHTANSPTQIEQIYTASTTTFQNKKLTDLPTPGYIFITPTV

SEQ ID NO: 2502 - protein, 5 aa, synthetic construct
HHHHH

SEQ ID NO: 2503 - protein, 10 aa, synthetic construct
SPTQIEQIYT

SEQ ID NO: 2504 - protein, 9 aa, synthetic construct
YPYDVPDYA

SEQ ID NO: 2505 - protein, 39 aa, unidentified
CSEEEEESNLFERLLRQRTKQLQLKRRIIQTLKDLQKLE

SEQ ID NO: 2506 - DNA, 2979 bp, unidentified
  source 1..2979: mol_type = unassigned DNA
cctaataaatattcaacaggaaaaccacctaatttaaattgccgaccacaaaccgtcacttagttcccctttttgcaacaacttctgcttttttccaactgccggaaaaccacataatttgcatggctaaccacaaactgatatgctaattaacttccacaaaacaacttccccttttaaaaccacacctacaaattaattattaaacacagtcacatcctgggaggtactaccacactataataccaagtgcacttccgaatggctgagtttatgccgctagacggagaacgcatcagttactgactgcggactgaacttgggcgggtgccgaaggtgagtgaaaccaccgaagtcaaggggcaattcgggctagttcagtctagcggaacgggcaagaaacttaaaattattttatttttcagatgagcgactgctttaaaccaacatgctacaacaacaaaacaaagcaaactcactggattaataacctgcatttaacccacgacctgatctgcttctgcccaacaccaactagacacttattactagctttagcagaacaacaagaaacaattgaagtgtctaaacaagaaaaagaaaaaataacaagatgccttattactacagaagaagacggtacaactacagacgtcctagatggtatggacgaggttggattagacgcccttttcgcagaagatttcgaagaaaaagaagggtaagacctacttatactactattcctctaaagcaatggcaaccgccatataaaagaacatgctatataaaaggacaagactgtttaatatactatagcaacttaagactgggaatgaatagtacaatgtatgaaaaaagtattgtacctgtacattggccgggagggggttctttttctgtaagcatgttaactttagatgccttgtatgatatacataaactttgtagaaactggtggacatccacaaaccaagacttaccactagtaagatataaaggatgcaaaataacattttatcaaagcacatttacagactacatagtaagaatacatacagaactaccagctaacagtaacaaactaacatacccaaacacacatccactaatgatgatgatgtctaagtacaaacacattatacctagtagacaaacaagaagaaaaaagaaaccatacacaaaaatatttgtaaaaccacctccgcaatttgaaaacaaatggtactttgctacagacctctacaaaattccattactacaaatacactgcacagcatgcaacttacaaaacccatttgtaaaaccagacaaattatcaaacaatgttacattatggtcactaaacaccataagcatacaaaatagaaacatgtcagtggatcaaggacaatcatggccatttaaaatactaggaacacaaagcttttatttttacttttacaccggagcaaacctaccaggtgacacaacacaaataccagtagcagacctattaccactaacaaacccaagaataaacagaccaggacaatcactaaatgaggcaaaaattacagaccatattactttcacagaatacaaaaacaaatttacaaattattggggtaacccatttaataaacacattcaagaacacctagatatgatactatactcactaaaaagtccagaagcaataaaaaacgaatggacaacagaaaacatgaaatggaaccaattaaacaatgcaggaacaatggcattaacaccatttaacgagccaatattcacacaaatacaatataacccagatagagacacaggagaagacactcaattatacctactctctaacgctacaggaacaggatgggacccaccaggaattccagaattaatactagaaggatttccactatggttaatatattggggatttgcagactttcaaaaaaacctaaaaaaagtaacaaacatagacacaaattacatgttagtagcaaaaacaaaatttacacaaaaacctggcacattctacttagtaatactaaatgacacctttgtagaaggcaatagcccatatgaaaaacaacctttacctgaagacaacattaaatggtacccacaagtacaataccaattagaagcacaaaacaaactactacaaactgggccatttacaccaaacatacaaggacaactatcagacaatatatcaatgttttataaattttactttaaatggggaggaagcccaccaaaagcaattaatgttgaaaatcctgcccaccagattcaatatcccataccccgtaacgagcatgaaacaacttcgttacagagtccaggggaagccccagaatccatcttatactccttcgactatagacacgggaactacacaacaacagctttgtcacgaattagccaagactgggcacttaaagacactgtttctaaaattacagagccagatcgacagcaactgctcaaacaagccctcgaatgcctgcaaatctcggaagaaacgcaggagaaaaaagaaaaagaagtacagcagctcatcagcaacctcagacagcagcagcagctgtacagagagcgaataatatcattattaaaggaccaataacttttaactgtgtaaaaaaggtgaaattgtttgatgataaaccaaaaaaccgtagatttacacctgaggaatttgaaactgagttacaaatagcaaaatggttaaagagacccccaagatcctttgtaaatgatcctcccttttacccatggttaccacctgaacctgttgtaaactttaagcttaattttactgaataaaggccagcattaattcacttaaggagtctgtttatttaagttaaaccttaataaacggtcaccgcctccctaatacgcaggcgcagaaagggggctccgccccctttaacccccagggggctccgccccctgaaacccccaagggggctacgcccccttacaccc

SEQ ID NO: 2507 - DNA, 3733 bp, Alphatorquevirus sp.
  source 1..3733: mol_type = genomic DNA
cacgtgactcccgcaggccaaccagagtctacgtcgtgcacttcctgggcatggtctacatcataatataagaaggcgcacttccgaatggctgagttttccacgcccgtccgcagcgagaacgccacggagggagatcctcgcgtcccgagggcgggtgccggaggtgagtttacacaccgcagtcaaggggcaattcgggctcgggactggccgggccccgggcaaggctcttaaaaaatgcgctttcgcagggttgctgagaaaaggaaagtgcttctgcaaactgtgcgagctgcagagaagactaggcggcttctaggtatgtggcagccccccgcgcacaatgtccccggcatcgagagaaactggtacgagagctgttttcgatcccatgctgctgtttgcggctgtggcgactttgttggccatcttagttatctggcaactactctgggtcgtcctccgcgtcctgggcccccaggcggaccccgcacaccgcagataagaaacctgccagcgctcccggcgccccagggcgagcccggtgacagagcgccatggcgtggggcttctggggccgacgccgccggtggagacggtggagaccacggcgcagacggtggagaccccgcagacgtaggagacgacgccctgctcgccgctttcgagctcgtcgaagagtaaggaggcgcggggggcggtggcgcagacgctacagaaaatggcgacggggcagacgcagacgaactcacagaaaaaagatagtcataaaacagtggcaaccaaactttataagacgctgctacatcatagggtacctacctttaatattctgtggcgaaaacacaaccgcccagaactatgccactcactcagacgacatgataagcaaaggaccatacggggggggcatgactaccacaaaatttactctgagaatactgtacgacgagtttaccaggtttatgaacttttggactgttagtaacgaagacctagacctgtgtagatacgtgggctgcaaactcatattttttaaacatcccacagtggactttatagtacagataaacactcagcctcctttcttagacacgcaccttaccgcggccagcatacacccgggcatcatgatgctcagcaagagacgcatactaataccctctctaaaaacccggccaagcagaaaacacagggtggttgttagggtgggcgccccaagactttttcaggacaagtggtacccccagtcagacctgtgtgacacagttctgctttccatatttgcaaccgcctgtgacttgcaatatccgttcggctcaccactaactgacaacccttgcgtcaacttccagattctggggccccagtacaaaaaacaccttagtattagctctactatggatacaactaacaaacagcactatgacagcaatttgtttaaccaaactcagctatacaacacctttcaaactatagctcagcttaaagagacaggacaaactgcaaacatatctcctagttggagtgcagtgcaaaataatatggcccttagtaataccggtgaaaatgcaacccaaagcaaagacacttggtacaaaggaaacacatacaacaaccacattacaacgttagcacaaaaaaccagagaaagatttaaaggtgcaacaaaagcagcactacaaaactaccccaccataatgtccacagacttatatgaataccactcaggcatatactccagcatatttctatcagctggcaggagctactttgaaaccaccggggcctactctgacattatatacaaccctttcacagacaaaggcacaggcaacataatctggatagactacctcacaaaagaagacaccatttttgtaaaaaacaaaagcaaatgcgaaataatggacatgcccctgtgggcggcctgcacaggatatacagagttctgtgcaaagtatacaggagactctgccattatttacaatgccagagtactaataagatgcccgtacactgaacccatgctaatagaccactcagacccgaacaaaggcttcgtaccctactcatttaactttggcaacggaaaaatgcccggaggcagctccaacgtacccataagaatgagagccaaatggtacgtgaacatattccaccaaaaagaggttctagagactatagtacagagcggaccgttcgggtacaagggcgacataaaatcagctgtactggccatgaaatacagatttcactggaaatggggtggaaaccctatatccaaacaggtcgtcaggaatccctgctccaactccagctcctccgcggcccatagaggacctcgcagcgtacaagcagttgacccgaaatacaataccccagaggtcacgtggcactcgtgggacatcagacgaggactctttggcaaagcaggtattaaaagaatgcaacaagaatcagatgctctttacattcctccaggaccattcaagagacctcgcagagacacgaacgcccaagacccagaagagcaaaacgaaagctcaggtttcagagtccagcagcgactcccgtgggtccactccagccaagagacgcaaagctcccaagaagaaacggaggcgcaggggtcggtacaagaccaactactcctccagctccgagagcagcgagtactccgactccagctccagcaactcgcaacccaagtcctcaaagtccaagcagggcacggcatacaccccctattatcttcccaagcgtaaacaaagtctttatgtttgagccccacggtcctaaacccatacagggctacaacgattggctagaggagtacactgcttgtaaattctgggacagacccccaagaaagctacacacagacttacccttttacccctgggcaccaaaaccccaagaccaagtcagggtaagctttaaactcaactttcaataaaaattctaggccgtgggagtttcacttgtcggtgtctgcttcttaaggtcgccaagcactccgagcgccagcgaggagtgcgaccccccctccggtagcaacgccttcggagccgcgcgctacgccttcggctgcgcgcggcacctcagaccccccctccacccgaaacgcttgcgcgtttcggaccttcggcgtcgggggggtcgggagctttattaaacagactccgagttgccattggacactggagctgtgaatcagtaacgaaagtgagtggggccagacttcgccatagggcctttatcttctcgccattggatagtgtccggggtcgccgtaggcttcggcctcgtttttaggccttccggactacaaaaatggcgaacttggtgacgtcacggccgccattttaagtaaggcggaagcagctccactttctcacaaaatggcggcggagcacttccggcttgcccaaaatagcgggcaagctcttccgggtcaaaggtcagcagctacgtcacaagtcacctgactgaggaggagctaaaacccggaagtcctcctcggtcacgtggctagtcacgtgactactacgtcatcggcgccatcttgtgtgacaaaatggcggacaacttccgcttttttgaaaaaaggcgcgaaaaaacggcggcggcggcgcgcgcgctgcgcgcgcgcgccgagggggcgccagcgcccccactgtgcggtcccccgcggggctccggcccccccccgaagtccgtcactaac

SEQ ID NO: 2508 - protein, 199 aa, Alphatorquevirus sp.
MAWGFWGRRRRWRRWRSRRRRWRPRRRRRRRPARRFRARRRVVRNPCSNSSSSAAHRGPRSVQAVDPKYNTPEVTWHSWDIRRGLFGKAGIKRMQQESDALYIPPGPFKRPRRDTNAQDPEEQNESSGFRVQQRLPWVHSSQETQSSQEETEAQGSVQDQLLLQLREQRVLRLQLQQLATQVLKVQAGHGIHPLLSSQA

SEQ ID NO: 2509 - protein, 141 aa, Alphatorquevirus sp.
MAWGFWGRRRRWRRWRPRRRRWRPRRRRRRRPARRFRARRRDHSRDLAETRTPKTQKSKTKAQVSESSSDSRGSTPAKRRKAPKKKRRRRGRYKTNYSSSSESSEYSDSSSSNSQPKSSKSKQGTAYTPYYLPKRKQSLYV

SEQ ID NO: 2510 - protein, 120 aa, Alphatorquevirus sp.
MWQPPAHNVPGIERNWYESCFRSHAAVCGCGDFVGHLSYLATTLGRPPRPGPPGGPRTPQIRNLPALPAPQGEPGDRAPWRGASGADAAGGDGGDHGADGGDPADVGDDALLAAFELVEE

SEQ ID NO: 2511 - protein, 284 aa, Alphatorquevirus sp.
MWQPPAHNVPGIERNWYESCFRSHAAVCGCGDFVGHLSYLATTLGRPPRPGPPGGPRTPQIRNLPALPAPQGEPGDRAPWRGASGADAAGGDGGDHGADGGDPADVGDDALLAAFELVEESSGIPAPTPAPPRPIEDLAAYKQLTRNTIPQRSRGTRGTSDEDSLAKQVLKECNKNQMLFTFLQDHSRDLAETRTPKTQKSKTKAQVSESSSDSRGSTPAKRRKAPKKKRRRRGRYKTNYSSSSESSEYSDSSSSNSQPKSSKSKQGTAYTPYYLPKRKQSLYV

SEQ ID NO: 2512 - protein, 277 aa, Alphatorquevirus sp.
MWQPPAHNVPGIERNWYESCFRSHAAVCGCGDFVGHLSYLATTLGRPPRPGPPGGPRTPQIRNLPALPAPQGEPGDRAPWRGASGADAAGGDGGDHGADGGDPADVGDDALLAAFELVEETIQETSQRHERPRPRRAKRKLRFQSPAATPVGPLQPRDAKLPRRNGGAGVGTRPTTPPAPRAASTPTPAPATRNPSPQSPSRARHTPPIIFPSVNKVFMFEPHGPKPIQGYNDWLEEYTACKFWDRPPRKLHTDLPFYPWAPKPQDQVRVSFKLNFQ

SEQ ID NO: 2513 - DNA, 2876 bp, Betatorquevirus sp.
  source 1..2876: mol_type = genomic DNA
ataaatattcaacaggaaaaccacctaattagaattgccgaccacaaaccgtcacttacttctcctttttgcacttacttcctcttttacttattattattcattacattaattaataatcactgtaattccggggaggagctaacaatctatataactaactacacttccgaatggctgagtttatgccgccagacggagacgggatcacttcagtgactccaggctgaacttgggcgggagccgaaggtgagtgcaaccaccgtagtctaggggcaattcgggctagttcagtatggcggaacgggcaagaaacttaaatattattattttacagatgcaaatacaaccacctattagaaccttcaaacaaacaatttcagattggaaaaacttaattgtccacgttcacgacaacatttgcaactgcaataaaccattagaacacactattgatacctgtatcaccaatccagatgaattaagattaaacaaatctactaaacaacaactacaaaaatgccttggtaccccagaagaagatacccaagaagacgttatcgatggcttcgcagatggagagctagacgcccttttcgcccaagatacagaagaagatactgggtaagaaactattctcgaaagagaaaactatttaaaataacaaccaaagaatggcaaccaaaagttataagaaagactcatgtaaagggcacctatcctttgtttctttgtacaaagcacagaattaacaataatatgatacaatatttagactctatagctccagaacactattacggaggaggaggattttcaataatgcaattttccttacaagccttatatgaagaatttataaaagcaaaaaactggtggactaatacaaactgctttttaccacttgtaagatatatgggttgctcattcaaattttataaaactgaattttatgattatattgtactaattgaaagatgttatccacttgcttgtactgatgaaatgtacttatctactcaacctagtattatgatgcttacaagaaaatgtatttttgtaccatgcaaacaaaacagcaaaggtaaaaaaccttacaaaaaagttagagtaagaccaccttcacaaatgactacaggatggcatttctcacaagacttagcaaacatgccacttgtagtactaaaaacttcagtatgcagctttgacagatattacacagacagtacagctaaatcaaccacaataggctttaaaacacttaacacacaaacatttagatatcatgactggcaggaaccacctacaacaggatacaaaccacaaaacctactatggttttatggagcagaaaacggatcaccagtagaccccaacaacacaatagtatcaaacctaatatacttaggaggcacaggaccttatgaaaaaggcacaccaataaaaacaaacataagcaattacttttcagagcctaaactgtggggaaatatatttcacgatgattatacatcaggaacatcacccgtgtttgttacaaacaaatcaccatcagaaattaaaaccgcatggaacactataaaagacttaactgttaaagctagcggtgtatttacattaagaacaattccactatggctaccttgcagatacaacccatttgcagacaaagcaaccaacaacaaaatatggctagtttctatacattcagaccacacagaatggaaaccaatagacaatccattactacaacgaacagaccttcctttatggttacttgtatggggttggcaagattggcagaaaaaaaaccaacaaacttcacaacctgatattaattatttaacagtaatatcttcaccatatatatcatgctacccaaaattagattactatgtgttactagatgaaggattttgggagggtcactcaacatacatagagtcaattacagactcagacaaaaaacactggtaccctaaaaatagatttcaaatagaaacacttaatctaatagctaacacaggtccaggaactgtaaaactaagagaaaaccaagcagcagaaggtcacatggtatatcgctttaattttaagcttggaggatgtcccgcaccgatggaaaaaatatgtgaccctagcaaacaatccaaatatcctattcccaataaccagcaacaaacaacttcgttgcagagtccagaaaacccaattcaaacctatctctacgacttcgacgaaaggaggggcctacttacagaaagagctacaaaaagaatcaaacaagatcacacatctgaaaaaactgttttgccatttacaggagcagcaacagacctccccatactccaaacaacatcacaggaggaaagctcctcggaagaagaagaagagcaacaagcggagaagaaactactccagctccgaagaaagcagcaccgactccgggagcgaatcctccagctattagacatacaaaatacataataaaacaaagtactgtaaaaattgatatgtttggagatactcatgtacctaaccgtagaatgaccccagaagaatttgaacaagaactaattgtcgctggtgtttttcgcagacctccttgttactatataaaagatagacctacttatccttatgtaccaaaacctactgatgaaaaatgtatggtaaactttgacttaaactttccttaataaactacgcctgcaaactttcactctcggtgtccatttatataagataaaacttaaataaacatccaccactctcccaaatacgcaggcgcacaagggggctccgcccccttaaacccccaagggggctccgcccccttaaacccccaagggggctccgcccccttacacccccta

SEQ ID NO: 2514 - protein, 449 aa, Chicken anemia virus
MARRARRPRGRFYSFRRGRWHHLKRLRRRYKFRHRRRQRYRRRAFRKAFHNPRPGTYSVRLPNPQSTMTIRFQGVIFLTEGLILPKNSTAGGYADHMYGARVAKISVNLKEFLLASMNLTYVSKIGGPIAGELIADGSKSQAADNWPNCWLPLDNNVPSATPSAWWRWALMMMQPTDSCRFFNHPKQMTLQDMGRMFGGWHLFRHIETRFQLLATKNEGSFSPVASLLSQGEYLTRRDDVKYSSDHQNRWQKGGQPMTGGIAYATGKMRPDEQQYPAMPPDPPIITATTAQGTQVRCMNSTQAWWSWDTYMSFATLTALGAQWSFPPGQRSVSRRSFNHHKARGAGDPKGQRWHTLVPLGTETITDSYMSAPASELDTNFFTLYVAQGTNKSQQYKFGTATYALKEPVMKSDAWAVVRVQSVWQLGNRQRPYPWDVNWANSTMYWGTQP

SEQ ID NO: 2515 - protein, 216 aa, Chicken anemia virus
MHGNGGQPAAGGSESALSREGQPGPSGAAQGQVISNERSPRRYSTRTINGVQATNKFTAVGNPSLQRDPDWYRWNYNHSIAVWLRECSRSHAKICNCGQFRKHWFQECAGLEDRSTQASLEEAILRPLRVQGKRAKRKLDYHYSQPTPNRKKAYKTVRWQDELADREADFTPSEEDGGTTSSDFDEDINFDIGGDSGIVDELLGRPFTTPAPVRIV

SEQ ID NO: 2516 - protein, 121 aa, Chicken anemia virus
MNALQEDTPPGPSTVFRPPTSSRPLETPHCREIRIGIAGITITLSLCGCANARAPTLRSATADNSESTGFKNVPDLRTDQPKPPSKKRSCDPSEYRVSELKESLITTTPSRPRTAKRRIRL

SEQ ID NO: 2517 - protein, 38 aa, Betatorquevirus sp.; identical to SEQ ID NO: 216

SEQ ID NO: 2518 - protein, 186 aa, Betatorquevirus sp.
PTYTTIPLKQWQPPYKRTCYIKGQDCLIYYSNLRLGMNSTMYEKSIVPVHWPGGGSFSVSMLTLDALYDIHKLCRNWWTSTNQDLPLVRYKGCKITFYQSTFTDYIVRIHTELPANSNKLTYPNTHPLMMMMSKYKHIIPSRQTRRKKKPYTKIFVKPPPQFENKWYFATDLYKIPLLQIHCTACN

SEQ ID NO: 2519 - protein, 150 aa, Betatorquevirus sp.
LQNPFVKPDKLSNNVTLWSLNTISIQNRNMSVDQGQSWPFKILGTQSFYFYFYTGANLPGDTTQIPVADLLPLTNPRINRPGQSLNEAKITDHITFTEYKNKFTNYWGNPFNKHIQEHLDMILYSLKSPEAIKNEWTTENMKWNQLNNAG

SEQ ID NO: 2520 - protein, 167 aa, Betatorquevirus sp.
TMALTPFNEPIFTQIQYNPDRDTGEDTQLYLLSNATGTGWDPPGIPELILEGFPLWLIYWGFADFQKNLKKVTNIDTNYMLVAKTKFTQKPGTFYLVILNDTFVEGNSPYEKQPLPEDNIKWYPQVQYQLEAQNKLLQTGPFTPNIQGQLSDNISMFYKFYFKWGGS

SEQ ID NO: 2521 - protein, 125 aa, Betatorquevirus sp.
PPKAINVENPAHQIQYPIPRNEHETTSLQSPGEAPESILYSFDYRHGNYTTTALSRISQDWALKDTVSKITEPDRQQLLKQALECLQISEETQEKKEKEVQQLISNLRQQQQLYRERIISLLKDQ

SEQ ID NO: 2522 - protein, 622 aa, synthetic construct
MLKQWQPPYKRTCYIKGQDCLIYYSNLRLGMNSTMYEKSIVPVHWPGGGSFSVSMLTLDALYDIHKLCRNWWTSTNQDLPLVRYKGCKITFYQSTFTDYIVRIHTELPANSNKLTYPNTHPLMMMMSKYKHIIPSRQTRRKKKPYTKIFVKPPPQFENKWYFATDLYKIPLLQIHCTACNLQNPFVKPDKLSNNVTLWSLNTISIQNRNMSVDQGQSWPFKILGTQSFYFYFYTGANLPGDTTQIPVADLLPLTNPRINRPGQSLNEAKITDHITFTEYKNKFTNYWGNPFNKHIQEHLDMILYSLKSPEAIKNEWTTENMKWNQLNNAGTMALTPFNEPIFTQIQYNPDRDTGEDTQLYLLSNATGTGWDPPGIPELILEGFPLWLIYWGFADFQKNLKKVTNIDTNYMLVAKTKFTQKPGTFYLVILNDTFVEGNSPYEKQPLPEDNIKWYPQVQYQLEAQNKLLQTGPFTPNIQGQLSDNISMFYKFYFKWGGSPPKAINVENPAHQIQYPIPRNEHETTSLQSPGEAPESILYSFDYRHGNYTTTALSRISQDWALKDTVSKITEPDRQQLLKQALECLQISEETQEKKEKEVQQLISNLRQQQQLYRERIISLLKDQ

SEQ ID NO: 2523 - protein, 610 aa, synthetic construct
MPYYYRRRRYNYRRPRWYGRGWIRRPFRRRFRRKRRVRPTYTTIPLKQWQPPYKRTCYIKGQDCLIYYSNLRLGMNSTMYEKSIVPVHWPGGGSFSVSMLTLDALYDIHKLCRNWWTSTNQDLPLVRYKGCKITFYQSTFTDYIVRIHTELPANSNKLTYPNTHPLMMMMSKYKHIIPSRQTRRKKKPYTKIFVKPPPQFENKWYFATDLYKIPLLQIHCTACNLQNPFVKPDKLSNNVTLWSLNTISIQNRNMSVDQGQSWPFKILGTQSFYFYFYTGANLPGDTTQIPVADLLPLTNPRINRPGQSLNEAKITDHITFTEYKNKFTNYWGNPFNKHIQEHLDMILYSLKSPEAIKNEWTTENMKWNQLNNAGTMALTPFNEPIFTQIQYNPDRDTGEDTQLYLLSNATGTGWDPPGIPELILEGFPLWLIYWGFADFQKNLKKVTNIDTNYMLVAKTKFTQKPGTFYLVILNDTFVEGNSPYEKQPLPEDNIKWYPQVQYQLEAQNKLLQTGPFTPNIQGQLSDNISMFYKFYFKWGGSPPKAINVENPAHQIQYPIPRNEHETTSLQSPGEAPESILYSFDYRHGNYTTTALSRISQDWALKDTVSK

SEQ ID NO: 2524 - protein, 537 aa, synthetic construct
MPYYYRRRRYNYRRPRWYGRGWIRRPFRRRFRRKRRVRPTYTTIPLKQWQPPYKRTCYIKGQDCLIYYSNLRLGMNSTMYEKSIVPVHWPGGGSFSVSMLTLDALYDIHKLCRNWWTSTNQDLPLVRYKGCKITFYQSTFTDYIVRIHTELPANSNKLTYPNTHPLMMMMSKYKHIIPSRQTRRKKKPYTKIFVKPPPQFENKWYFATDLYKIPLLQIHCTACNLQNPFVKPDKLSNNVTLWSLNTISIQNRNMSVDQGQSWPFKILGTQSFYFYFYTGANLPGDTTQIPVADLLPLTNPRINRPGQSLNEAKITDHITFTEYKNKFTNYWGNPFNKHIQEHLDMILYSLKSPEAIKNEWTTENMKWNQLNNAGTMALTPFNEPIFTQIQYNPDRDTGEDTQLYLLSNATGTGWDPPGIPELILEGFPLWLIYWGFADFQKNLKKVTNIDTNYMLVAKTKFTQKPGTFYLVILNDTFVEGNSPYEKQPLPEDNIKWYPQVQYQLEAQNKLLQTGPFTPNIQGQLSDNISMFYKFYFK

SEQ ID NO: 2525 - protein, 566 aa, synthetic construct
MLKQWQPPYKRTCYIKGQDCLIYYSNLRLGMNSTMYEKSIVPVHWPGGGSFSVSMLTLDALYDIHKLCRNWWTSTNQDLPLVRYKGCKITFYQSTFTDYIVRIHTELPANSNKLTYPNTHPLMMMMSKYKHIIPSRQTRRKKKPYTKIFVKPPPQFENKWYFATDLYKIPLLQIHCTACNLQNPFVKPDKLSNNVTLWSLNTISIQNRNMSVDQGQSWPFKILGTQSFYFYFYTGANLPGDTTQIPVADLLPLTNPRINRPGQSLNEAKITDHITFTEYKNKFTNYWGNPFNKHIQEHLDMILYSLKSPEAIKNEWTTENMKWNQLNNAGTMALTPFNEPIFTQIQYNPDRDTGEDTQLYLLSNATGTGWDPPGIPELILEGFPLWLIYWGFADFQKNLKKVTNIDTNYMLVAKTKFTQKPGTFYLVILNDTFVEGNSPYEKQPLPEDNIKWYPQVQYQLEAQNKLLQTGPFTPNIQGQLSDNISMFYKFYFKWGGSPPKAINVENPAHQIQYPIPRNEHETTSLQSPGEAPESILYSFDYRHGNYTTTALSRISQDWALKDTVSK

SEQ ID NO: 2526 - protein, 493 aa, synthetic construct
MLKQWQPPYKRTCYIKGQDCLIYYSNLRLGMNSTMYEKSIVPVHWPGGGSFSVSMLTLDALYDIHKLCRNWWTSTNQDLPLVRYKGCKITFYQSTFTDYIVRIHTELPANSNKLTYPNTHPLMMMMSKYKHIIPSRQTRRKKKPYTKIFVKPPPQFENKWYFATDLYKIPLLQIHCTACNLQNPFVKPDKLSNNVTLWSLNTISIQNRNMSVDQGQSWPFKILGTQSFYFYFYTGANLPGDTTQIPVADLLPLTNPRINRPGQSLNEAKITDHITFTEYKNKFTNYWGNPFNKHIQEHLDMILYSLKSPEAIKNEWTTENMKWNQLNNAGTMALTPFNEPIFTQIQYNPDRDTGEDTQLYLLSNATGTGWDPPGIPELILEGFPLWLIYWGFADFQKNLKKVTNIDTNYMLVAKTKFTQKPGTFYLVILNDTFVEGNSPYEKQPLPEDNIKWYPQVQYQLEAQNKLLQTGPFTPNIQGQLSDNISMFYKFYFK

SEQ ID NO: 2527 - protein, 622 aa, synthetic construct; identical to SEQ ID NO: 2522

SEQ ID NO: 2528 - protein, 500 aa, synthetic construct
MLKQWQPPYKRTCYIKGQDCLIYYSNLRLGMNSTMYEKSIVPVHWPGGGSFSVSMLTLDALYDIHKLCRNWWTSTNQDLPLVRYKGCKITFYQSTFTDYIVRIHTELPANSNKLTYPNTHPLMMMMSKYKHIIPSRQTRRKKKPYTKIFVKPPPQFENKWYFATDLYKIPLLQIHCTACNLQNPFVKPDKLSNNVTLWSLNTISIQNRNMSVDQGQSWPFKILGTQSFYFYFYTGANLPGDTTQIPVADLLPLTNPRINRPGQSLNEAKITDHITFTEYKNKFTNYWGNPFNKHIQEHLDMILYSLKSPEAIKNEWTTENMKWNQLNNAGTMALTPFNEPIFTQIQYNPDRDTGEDTQLYLLSNATGTGWDPPGIPELILEGFPLWLIYWGFADFQKNLKKVTNIDTNYMLVAKTKFTQKPGTFYLVILNDTFVEGNSPYEKQPLPEDNIKWYPQVQYQLEAQNKLLQTGPFTPNIQGQLSDNISMFYKFYFKWGGSPPK

SEQ ID NO: 2529 - protein, 493 aa, synthetic construct; identical to SEQ ID NO: 2526

SEQ ID NO: 2530 - protein, 517 aa, synthetic construct
MPYYYRRRRYNYRRPRWYGRGWIRRPFRRRFRRKRRVRPTYTTIPLKQWQPPYKRTCYIKGQDCLIYYSNLRLGMNSTMYEKSIVPVHWPGGGSFSVSMLTLDALYDIHKLCRNWWTSTNQDLPLVRYKGCKITFYQSTFTDYIVRIHTELPANSNKLTYPNTHPLMMMMSKYKHIIPSRQTRRKKKPYTKIFVKPPPQFENKWYFATDLYKIPLLQIHCTACNLQNPFVKPDKLSNNVTLWSLNTISIQNRNMSVDQGQSWPFKILGTQSFYFYFYTGANLPGDTTQIPVADLLPLTNPRINRPGQSLNEAKITDHITFTEYKNKFTNYWGNPFNKHIQEHLDMILYSLKSPEAIKNEWTTENMKWNQLNNAGTMALTPFNEPIFTQIQYNPDRDTGEDTQLYLLSNATGTGWDPPGIPELILEGFPLWLIYWGFADFQKNLKKVTNIDTNYMLVAKTKFTQKPGTFYLVILNDTFVEGNSPYEKQPLPEDNIKWYPQVQYQLEAQNKLLQTGPFT

SEQ ID NO: 2531 - protein, 537 aa, synthetic construct; identical to SEQ ID NO: 2524

SEQ ID NO: 2532 - protein, 593 aa, synthetic construct
MPYYYRRRRYNYRRPRWYGRGWIRRPFRRRFRRKRRVRPTYTTIPLKQWQPPYKRTCYIKGQDCLIYYSNLRLGMNSTMYEKSIVPVHWPGGGSFSVSMLTLDALYDIHKLCRNWWTSTNQDLPLVRYKGCKITFYQSTFTDYIVRIHTELPANSNKLTYPNTHPLMMMMSKYKHIIPSRQTRRKKKPYTKIFVKPPPQFENKWYFATDLYKIPLLQIHCTACNLQNPFVKPDKLSNNVTLWSLNTISIQNRNMSVDQGQSWPFKILGTQSFYFYFYTGANLPGDTTQIPVADLLPLTNPRINRPGQSLNEAKITDHITFTEYKNKFTNYWGNPFNKHIQEHLDMILYSLKSPEAIKNEWTTENMKWNQLNNAGTMALTPFNEPIFTQIQYNPDRDTGEDTQLYLLSNATGTGWDPPGIPELILEGFPLWLIYWGFADFQKNLKKVTNIDTNYMLVAKTKFTQKPGTFYLVILNDTFVEGNSPYEKQPLPEDNIKWYPQVQYQLEAQNKLLQTGPFTPNIQGQLSDNISMFYKFYFKWGGSPPKAINVENPAHQIQYPIPRNEHETTSLQSPGEAPESILYSFDYRHGNYTTT

SEQ ID NO: 2533 - protein, 629 aa, synthetic construct
MPYYYRRRRYNYRRPRWYGRGWIRRPFRRRFRRKRRVRPTYTTIPLKQWQPPYKRTCYIKGQDCLIYYSNLRLGMNSTMYEKSIVPVHWPGGGSFSVSMLTLDALYDIHKLCRNWWTSTNQDLPLVRYKGCKITFYQSTFTDYIVRIHTELPANSNKLTYPNTHPLMMMMSKYKHIIPSRQTRRKKKPYTKIFVKPPPQFENKWYFATDLYKIPLLQIHCTACNLQNPFVKPDKLSNNVTLWSLNTISIQNRNMSVDQGQSWPFKILGTQSFYFYFYTGANLPGDTTQIPVADLLPLTNPRINRPGQSLNEAKITDHITFTEYKNKFTNYWGNPFNKHIQEHLDMILYSLKSPEAIKNEWTTENMKWNQLNNAGTMALTPFNEPIFTQIQYNPDRDTGEDTQLYLLSNATGTGWDPPGIPELILEGFPLWLIYWGFADFQKNLKKVTNIDTNYMLVAKTKFTQKPGTFYLVILNDTFVEGNSPYEKQPLPEDNIKWYPQVQYQLEAQNKLLQTGPFTPNIQGQLSDNISMFYKFYFKWGGSPPKAINVENPAHQIQYPIPRNEHETTSLQSPGEAPESILYSFDYRHGNYTTTALSRISQDWALKDTVSKITEPDRQQLLKQALECLQI

SEQ ID NO: 2534 - protein, 622 aa, synthetic construct
MIVEWQPKSIRKCRIKGMLCLFQTTEDRLSYNFDMYEESIIPEKLPGGGGFSIKNISLYALYQEHIHAHNIFTHTNTDRPLARYTGCSLKFYQSKDIDYVVTYSTSLPLRSSMGMYNSMQPSIHLMQQNKLIVPSKQTQKRRKPYIKKHISPPTQMKSQWYFQHNIANIPLLMIRTTALTLDNYYIGSRQLSTNVTIHTLNTTYIQNRDWGDRNKTYYCQTLGTQRYFLYGTHSTAQNINDIKLQELIPLTNTQDYVQGFDWTEKDKHNITTYKEFLTKGAGNPFHAEWITAQNPVIHTANSPTQIEQIYTASTTTFQNKKLTDLPTPGYIFITPTVSLRYNPYKDLAERNKCYFVRSKINAHGWDPEQHQELINSDLPQWLLLFGYPDYIKRTQNFALVDTNYILVDHCPYTNPEKTPFIPLSTSFIEGRSPYSPSDTHEPDEEDQNRWYPCYQYQQESINSICLSGPGTPKIPKGITAEAKVKYSFNFKWGGDLPPMSTITNPTDQPTYVVPNNFNETTSLQNPTTRPEHFLYSFDERRGQLTEKATKRLLKDWETKETSLLSTEYRFAEPTQTQAPQEDPSSEEEEESNLFERLLRQRTKQLQLKRRIIQTLKDLQKLE

SEQ ID NO: 2535 - protein, 609 aa, synthetic construct
MPWWYRRRSYNPWRRRNWFRRPRKTIYRRYRRRRRWVRRKPFYKRKIKRLNIVEWQPKSIRKCRIKGMLCLFQTTEDRLSYNFDMYEESIIPEKLPGGGGFSIKNISLYALYQEHIHAHNIFTHTNTDRPLARYTGCSLKFYQSKDIDYVVTYSTSLPLRSSMGMYNSMQPSIHLMQQNKLIVPSKQTQKRRKPYIKKHISPPTQMKSQWYFQHNIANIPLLMIRTTALTLDNYYIGSRQLSTNVTIHTLNTTYIQNRDWGDRNKTYYCQTLGTQRYFLYGTHSTAQNINDIKLQELIPLTNTQDYVQGFDWTEKDKHNITTYKEFLTKGAGNPFHAEWITAQNPVIHTANSPTQIEQIYTASTTTFQNKKLTDLPTPGYIFITPTVSLRYNPYKDLAERNKCYFVRSKINAHGWDPEQHQELINSDLPQWLLLFGYPDYIKRTQNFALVDTNYILVDHCPYTNPEKTPFIPLSTSFIEGRSPYSPSDTHEPDEEDQNRWYPCYQYQQESINSICLSGPGTPKIPKGITAEAKVKYSFNFKWGGDLPPMSTITNPTDQPTYVVPNNFNETTSLQNPTTRPEHFLYSFDERRGQLTEKATKRLLKDWETK

SEQ ID NO: 2536 - protein, 541 aa, synthetic construct
MPWWYRRRSYNPWRRRNWFRRPRKTIYRRYRRRRRWVRRKPFYKRKIKRLNIVEWQPKSIRKCRIKGMLCLFQTTEDRLSYNFDMYEESIIPEKLPGGGGFSIKNISLYALYQEHIHAHNIFTHTNTDRPLARYTGCSLKFYQSKDIDYVVTYSTSLPLRSSMGMYNSMQPSIHLMQQNKLIVPSKQTQKRRKPYIKKHISPPTQMKSQWYFQHNIANIPLLMIRTTALTLDNYYIGSRQLSTNVTIHTLNTTYIQNRDWGDRNKTYYCQTLGTQRYFLYGTHSTAQNINDIKLQELIPLTNTQDYVQGFDWTEKDKHNITTYKEFLTKGAGNPFHAEWITAQNPVIHTANSPTQIEQIYTASTTTFQNKKLTDLPTPGYIFITPTVSLRYNPYKDLAERNKCYFVRSKINAHGWDPEQHQELINSDLPQWLLLFGYPDYIKRTQNFALVDTNYILVDHCPYTNPEKTPFIPLSTSFIEGRSPYSPSDTHEPDEEDQNRWYPCYQYQQESINSICLSGPGTPKIPKGITAEAKVKYSFNFK

SEQ ID NO: 2537 - protein, 559 aa, synthetic construct
MIVEWQPKSIRKCRIKGMLCLFQTTEDRLSYNFDMYEESIIPEKLPGGGGFSIKNISLYALYQEHIHAHNIFTHTNTDRPLARYTGCSLKFYQSKDIDYVVTYSTSLPLRSSMGMYNSMQPSIHLMQQNKLIVPSKQTQKRRKPYIKKHISPPTQMKSQWYFQHNIANIPLLMIRTTALTLDNYYIGSRQLSTNVTIHTLNTTYIQNRDWGDRNKTYYCQTLGTQRYFLYGTHSTAQNINDIKLQELIPLTNTQDYVQGFDWTEKDKHNITTYKEFLTKGAGNPFHAEWITAQNPVIHTANSPTQIEQIYTASTTTFQNKKLTDLPTPGYIFITPTVSLRYNPYKDLAERNKCYFVRSKINAHGWDPEQHQELINSDLPQWLLLFGYPDYIKRTQNFALVDTNYILVDHCPYTNPEKTPFIPLSTSFIEGRSPYSPSDTHEPDEEDQNRWYPCYQYQQESINSICLSGPGTPKIPKGITAEAKVKYSFNFKWGGDLPPMSTITNPTDQPTYVVPNNFNETTSLQNPTTRPEHFLYSFDERRGQLTEKATKRLLKDWETK

SEQ ID NO: 2538 - protein, 491 aa, synthetic construct
MIVEWQPKSIRKCRIKGMLCLFQTTEDRLSYNFDMYEESIIPEKLPGGGGFSIKNISLYALYQEHIHAHNIFTHTNTDRPLARYTGCSLKFYQSKDIDYVVTYSTSLPLRSSMGMYNSMQPSIHLMQQNKLIVPSKQTQKRRKPYIKKHISPPTQMKSQWYFQHNIANIPLLMIRTTALTLDNYYIGSRQLSTNVTIHTLNTTYIQNRDWGDRNKTYYCQTLGTQRYFLYGTHSTAQNINDIKLQELIPLTNTQDYVQGFDWTEKDKHNITTYKEFLTKGAGNPFHAEWITAQNPVIHTANSPTQIEQIYTASTTTFQNKKLTDLPTPGYIFITPTVSLRYNPYKDLAERNKCYFVRSKINAHGWDPEQHQELINSDLPQWLLLFGYPDYIKRTQNFALVDTNYILVDHCPYTNPEKTPFIPLSTSFIEGRSPYSPSDTHEPDEEDQNRWYPCYQYQQESINSICLSGPGTPKIPKGITAEAKVKYSFNFK

SEQ ID NO: 2539 - protein, 628 aa, synthetic construct
MKIKRLNIVEWQPKSIRKCRIKGMLCLFQTTEDRLSYNFDMYEESIIPEKLPGGGGFSIKNISLYALYQEHIHAHNIFTHTNTDRPLARYTGCSLKFYQSKDIDYVVTYSTSLPLRSSMGMYNSMQPSIHLMQQNKLIVPSKQTQKRRKPYIKKHISPPTQMKSQWYFQHNIANIPLLMIRTTALTLDNYYIGSRQLSTNVTIHTLNTTYIQNRDWGDRNKTYYCQTLGTQRYFLYGTHSTAQNINDIKLQELIPLTNTQDYVQGFDWTEKDKHNITTYKEFLTKGAGNPFHAEWITAQNPVIHTANSPTQIEQIYTASTTTFQNKKLTDLPTPGYIFITPTVSLRYNPYKDLAERNKCYFVRSKINAHGWDPEQHQELINSDLPQWLLLFGYPDYIKRTQNFALVDTNYILVDHCPYTNPEKTPFIPLSTSFIEGRSPYSPSDTHEPDEEDQNRWYPCYQYQQESINSICLSGPGTPKIPKGITAEAKVKYSFNFKWGGDLPPMSTITNPTDQPTYVVPNNFNETTSLQNPTTRPEHFLYSFDERRGQLTEKATKRLLKDWETKETSLLSTEYRFAEPTQTQAPQEDPSSEEEEESNLFERLLRQRTKQLQLKRRIIQTLKDLQKLE

SEQ ID NO: 2540 - protein, 524 aa, synthetic construct
MKIKRLNIVEWQPKSIRKCRIKGMLCLFQTTEDRLSYNFDMYEESIIPEKLPGGGGFSIKNISLYALYQEHIHAHNIFTHTNTDRPLARYTGCSLKFYQSKDIDYVVTYSTSLPLRSSMGMYNSMQPSIHLMQQNKLIVPSKQTQKRRKPYIKKHISPPTQMKSQWYFQHNIANIPLLMIRTTALTLDNYYIGSRQLSTNVTIHTLNTTYIQNRDWGDRNKTYYCQTLGTQRYFLYGTHSTAQNINDIKLQELIPLTNTQDYVQGFDWTEKDKHNITTYKEFLTKGAGNPFHAEWITAQNPVIHTANSPTQIEQIYTASTTTFQNKKLTDLPTPGYIFITPTVSLRYNPYKDLAERNKCYFVRSKINAHGWDPEQHQELINSDLPQWLLLFGYPDYIKRTQNFALVDTNYILVDHCPYTNPEKTPFIPLSTSFIEGRSPYSPSDTHEPDEEDQNRWYPCYQYQQESINSICLSGPGTPKIPKGITAEAKVKYSFNFKWGGDLPPMSTITNPTDQPTYVVPNNFN

SEQ ID NO: 2541 - protein, 521 aa, synthetic construct
MKIKRLNIVEWQPKSIRKCRIKGMLCLFQTTEDRLSYNFDMYEESIIPEKLPGGGGFSIKNISLYALYQEHIHAHNIFTHTNTDRPLARYTGCSLKFYQSKDIDYVVTYSTSLPLRSSMGMYNSMQPSIHLMQQNKLIVPSKQTQKRRKPYIKKHISPPTQMKSQWYFQHNIANIPLLMIRTTALTLDNYYIGSRQLSTNVTIHTLNTTYIQNRDWGDRNKTYYCQTLGTQRYFLYGTHSTAQNINDIKLQELIPLTNTQDYVQGFDWTEKDKHNITTYKEFLTKGAGNPFHAEWITAQNPVIHTANSPTQIEQIYTASTTTFQNKKLTDLPTPGYIFITPTVSLRYNPYKDLAERNKCYFVRSKINAHGWDPEQHQELINSDLPQWLLLFGYPDYIKRTQNFALVDTNYILVDHCPYTNPEKTPFIPLSTSFIEGRSPYSPSDTHEPDEEDQNRWYPCYQYQQESINSICLSGPGTPKIPKGITAEAKVKYSFNFKWGGDLPPMSTITNPTDQPTYVVPN

SEQ ID NO: 2542 - protein, 515 aa, synthetic construct
MKIKRLNIVEWQPKSIRKCRIKGMLCLFQTTEDRLSYNFDMYEESIIPEKLPGGGGFSIKNISLYALYQEHIHAHNIFTHTNTDRPLARYTGCSLKFYQSKDIDYVVTYSTSLPLRSSMGMYNSMQPSIHLMQQNKLIVPSKQTQKRRKPYIKKHISPPTQMKSQWYFQHNIANIPLLMIRTTALTLDNYYIGSRQLSTNVTIHTLNTTYIQNRDWGDRNKTYYCQTLGTQRYFLYGTHSTAQNINDIKLQELIPLTNTQDYVQGFDWTEKDKHNITTYKEFLTKGAGNPFHAEWITAQNPVIHTANSPTQIEQIYTASTTTFQNKKLTDLPTPGYIFITPTVSLRYNPYKDLAERNKCYFVRSKINAHGWDPEQHQELINSDLPQWLLLFGYPDYIKRTQNFALVDTNYILVDHCPYTNPEKTPFIPLSTSFIEGRSPYSPSDTHEPDEEDQNRWYPCYQYQQESINSICLSGPGTPKIPKGITAEAKVKYSFNFKWGGDLPPMSTITNPTDQP

SEQ ID NO: 2543 - protein, 512 aa, synthetic construct
MKIKRLNIVEWQPKSIRKCRIKGMLCLFQTTEDRLSYNFDMYEESIIPEKLPGGGGFSIKNISLYALYQEHIHAHNIFTHTNTDRPLARYTGCSLKFYQSKDIDYVVTYSTSLPLRSSMGMYNSMQPSIHLMQQNKLIVPSKQTQKRRKPYIKKHISPPTQMKSQWYFQHNIANIPLLMIRTTALTLDNYYIGSRQLSTNVTIHTLNTTYIQNRDWGDRNKTYYCQTLGTQRYFLYGTHSTAQNINDIKLQELIPLTNTQDYVQGFDWTEKDKHNITTYKEFLTKGAGNPFHAEWITAQNPVIHTANSPTQIEQIYTASTTTFQNKKLTDLPTPGYIFITPTVSLRYNPYKDLAERNKCYFVRSKINAHGWDPEQHQELINSDLPQWLLLFGYPDYIKRTQNFALVDTNYILVDHCPYTNPEKTPFIPLSTSFIEGRSPYSPSDTHEPDEEDQNRWYPCYQYQQESINSICLSGPGTPKIPKGITAEAKVKYSFNFKWGGDLPPMSTITNPT

SEQ ID NO: 2544 - protein, 628 aa, synthetic construct; identical to SEQ ID NO: 2539

SEQ ID NO: 2545 - protein, 622 aa, synthetic construct; identical to SEQ ID NO: 2534

SEQ ID NO: 2546 - protein, 491 aa, synthetic construct; identical to SEQ ID NO: 2538

SEQ ID NO: 2547 - protein, 501 aa, synthetic construct
MIVEWQPKSIRKCRIKGMLCLFQTTEDRLSYNFDMYEESIIPEKLPGGGGFSIKNISLYALYQEHIHAHNIFTHTNTDRPLARYTGCSLKFYQSKDIDYVVTYSTSLPLRSSMGMYNSMQPSIHLMQQNKLIVPSKQTQKRRKPYIKKHISPPTQMKSQWYFQHNIANIPLLMIRTTALTLDNYYIGSRQLSTNVTIHTLNTTYIQNRDWGDRNKTYYCQTLGTQRYFLYGTHSTAQNINDIKLQELIPLTNTQDYVQGFDWTEKDKHNITTYKEFLTKGAGNPFHAEWITAQNPVIHTANSPTQIEQIYTASTTTFQNKKLTDLPTPGYIFITPTVSLRYNPYKDLAERNKCYFVRSKINAHGWDPEQHQELINSDLPQWLLLFGYPDYIKRTQNFALVDTNYILVDHCPYTNPEKTPFIPLSTSFIEGRSPYSPSDTHEPDEEDQNRWYPCYQYQQESINSICLSGPGTPKIPKGITAEAKVKYSFNFKWGGDLPPMST

SEQ ID NO: 2548 - protein, 650 aa, synthetic construct
MAWGFWGRRRRWRRWRPRRRRWRPRRRRRRRPARRFRARRRVRRRGGRWRRRYRKWRRGRRRRTHRKKIVIKQWQPNFIRRCYIIGYLPLIFCGENTTAQNYATHSDDMISKGPYGGGMTTTKFTLRILYDEFTRFMNFWTVSNEDLDLCRYVGCKLIFFKHPTVDFIVQINTQPPFLDTHLTAASIHPGIMMLSKRRILIPSLKTRPSRKHRVVVRVGAPRLFQDKWYPQSDLCDTVLLSIFATACDLQYPFGSPLTDNPCVNFQILGPQYKKHLSISSTMDTTNKQHYDSNLFNQTQLYNTFQTIAQLKETGQTANISPSWSAVQNNMALSNTGENATQSKDTWYKGNTYNNHITTLAQKTRERFKGATKAALQNYPTIMSTDLYEYHSGIYSSIFLSAGRSYFETTGAYSDIIYNPFTDKGTGNIIWIDYLTKEDTIFVKNKSKCEIMDMPLWAACTGYTEFCAKYTGDSAIIYNARVLIRCPYTEPMLIDHSDPNKGFVPYSFNFGNGKMPGGSSNVPIRMRAKWYVNIFHQKEVLETIVQSGPFGYKGDIKSAVLAMKYRFHWKWGGNPISKQVVRNPCSNSSSSAAHRGPRSVQAVDPKYNTPEVTWHSWDIRRGLFGKAGIKRMQQESDALYIPPGPFKRPRR

SEQ ID NO: 2549 - protein, 581 aa, synthetic construct
MAWGFWGRRRRWRRWRPRRRRWRPRRRRRRRPARRFRARRRVRRRGGRWRRRYRKWRRGRRRRTHRKKIVIKQWQPNFIRRCYIIGYLPLIFCGENTTAQNYATHSDDMISKGPYGGGMTTTKFTLRILYDEFTRFMNFWTVSNEDLDLCRYVGCKLIFFKHPTVDFIVQINTQPPFLDTHLTAASIHPGIMMLSKRRILIPSLKTRPSRKHRVVVRVGAPRLFQDKWYPQSDLCDTVLLSIFATACDLQYPFGSPLTDNPCVNFQILGPQYKKHLSISSTMDTTNKQHYDSNLFNQTQLYNTFQTIAQLKETGQTANISPSWSAVQNNMALSNTGENATQSKDTWYKGNTYNNHITTLAQKTRERFKGATKAALQNYPTIMSTDLYEYHSGIYSSIFLSAGRSYFETTGAYSDIIYNPFTDKGTGNIIWIDYLTKEDTIFVKNKSKCEIMDMPLWAACTGYTEFCAKYTGDSAIIYNARVLIRCPYTEPMLIDHSDPNKGFVPYSFNFGNGKMPGGSSNVPIRMRAKWYVNIFHQKEVLETIVQSGPFGYKGDIKSAVLAMKYRFHWKWGGNPISKQVVR

SEQ ID NO: 2550 - protein, 582 aa, synthetic construct
MVIKQWQPNFIRRCYIIGYLPLIFCGENTTAQNYATHSDDMISKGPYGGGMTTTKFTLRILYDEFTRFMNFWTVSNEDLDLCRYVGCKLIFFKHPTVDFIVQINTQPPFLDTHLTAASIHPGIMMLSKRRILIPSLKTRPSRKHRVVVRVGAPRLFQDKWYPQSDLCDTVLLSIFATACDLQYPFGSPLTDNPCVNFQILGPQYKKHLSISSTMDTTNKQHYDSNLFNQTQLYNTFQTIAQLKETGQTANISPSWSAVQNNMALSNTGENATQSKDTWYKGNTYNNHITTLAQKTRERFKGATKAALQNYPTIMSTDLYEYHSGIYSSIFLSAGRSYFETTGAYSDIIYNPFTDKGTGNIIWIDYLTKEDTIFVKNKSKCEIMDMPLWAACTGYTEFCAKYTGDSAIIYNARVLIRCPYTEPMLIDHSDPNKGFVPYSFNFGNGKMPGGSSNVPIRMRAKWYVNIFHQKEVLETIVQSGPFGYKGDIKSAVLAMKYRFHWKWGGNPISKQVVRNPCSNSSSSAAHRGPRSVQAVDPKYNTPEVTWHSWDIRRGLFGKAGIKRMQQESDALYIPPGPFKRPRR

SEQ ID NO: 2551 - protein, 513 aa, synthetic construct
MVIKQWQPNFIRRCYIIGYLPLIFCGENTTAQNYATHSDDMISKGPYGGGMTTTKFTLRILYDEFTRFMNFWTVSNEDLDLCRYVGCKLIFFKHPTVDFIVQINTQPPFLDTHLTAASIHPGIMMLSKRRILIPSLKTRPSRKHRVVVRVGAPRLFQDKWYPQSDLCDTVLLSIFATACDLQYPFGSPLTDNPCVNFQILGPQYKKHLSISSTMDTTNKQHYDSNLFNQTQLYNTFQTIAQLKETGQTANISPSWSAVQNNMALSNTGENATQSKDTWYKGNTYNNHITTLAQKTRERFKGATKAALQNYPTIMSTDLYEYHSGIYSSIFLSAGRSYFETTGAYSDIIYNPFTDKGTGNIIWIDYLTKEDTIFVKNKSKCEIMDMPLWAACTGYTEFCAKYTGDSAIIYNARVLIRCPYTEPMLIDHSDPNKGFVPYSFNFGNGKMPGGSSNVPIRMRAKWYVNIFHQKEVLETIVQSGPFGYKGDIKSAVLAMKYRFHWKWGGNPISKQVVR

SEQ ID NO: 2552 - protein, 599 aa, synthetic construct
MPWYPRRRYPRRRYRWLRRWRARRPFRPRYRRRYWVRNYSRKRKLFKITTKEWQPKVIRKTHVKGTYPLFLCTKHRINNNMIQYLDSIAPEHYYGGGGFSIMQFSLQALYEEFIKAKNWWTNTNCFLPLVRYMGCSFKFYKTEFYDYIVLIERCYPLACTDEMYLSTQPSIMMLTRKCIFVPCKQNSKGKKPYKKVRVRPPSQMTTGWHFSQDLANMPLVVLKTSVCSFDRYYTDSTAKSTTIGFKTLNTQTFRYHDWQEPPTTGYKPQNLLWFYGAENGSPVDPNNTIVSNLIYLGGTGPYEKGTPIKTNISNYFSEPKLWGNIFHDDYTSGTSPVFVTNKSPSEIKTAWNTIKDLTVKASGVFTLRTIPLWLPCRYNPFADKATNNKIWLVSIHSDHTEWKPIDNPLLQRTDLPLWLLVWGWQDWQKKNQQTSQPDINYLTVISSPYISCYPKLDYYVLLDEGFWEGHSTYIESITDSDKKHWYPKNRFQIETLNLIANTGPGTVKLRENQAAEGHMVYRFNFKLGGCPAPMEKICDPSKQSKYPIPNNQQQTTSLQSPENPIQTYLYDFDERRGLLTERATKRIKQDHTSEKTVLP

SEQ ID NO: 2553 - protein, 582 aa, synthetic construct
MPWYPRRRYPRRRYRWLRRWRARRPFRPRYRRRYWVRNYSRKRKLFKITTKEWQPKVIRKTHVKGTYPLFLCTKHRINNNMIQYLDSIAPEHYYGGGGFSIMQFSLQALYEEFIKAKNWWTNTNCFLPLVRYMGCSFKFYKTEFYDYIVLIERCYPLACTDEMYLSTQPSIMMLTRKCIFVPCKQNSKGKKPYKKVRVRPPSQMTTGWHFSQDLANMPLVVLKTSVCSFDRYYTDSTAKSTTIGFKTLNTQTFRYHDWQEPPTTGYKPQNLLWFYGAENGSPVDPNNTIVSNLIYLGGTGPYEKGTPIKTNISNYFSEPKLWGNIFHDDYTSGTSPVFVTNKSPSEIKTAWNTIKDLTVKASGVFTLRTIPLWLPCRYNPFADKATNNKIWLVSIHSDHTEWKPIDNPLLQRTDLPLWLLVWGWQDWQKKNQQTSQPDINYLTVISSPYISCYPKLDYYVLLDEGFWEGHSTYIESITDSDKKHWYPKNRFQIETLNLIANTGPGTVKLRENQAAEGHMVYRFNFKLGGCPAPMEKICDPSKQSKYPIPNNQQQTTSLQSPENPIQTYLYDFDERRGLLTER

SEQ ID NO: 2554 - protein, 607 aa, synthetic construct
MTKEWQPKVIRKTHVKGTYPLFLCTKHRINNNMIQYLDSIAPEHYYGGGGFSIMQFSLQALYEEFIKAKNWWTNTNCFLPLVRYMGCSFKFYKTEFYDYIVLIERCYPLACTDEMYLSTQPSIMMLTRKCIFVPCKQNSKGKKPYKKVRVRPPSQMTTGWHFSQDLANMPLVVLKTSVCSFDRYYTDSTAKSTTIGFKTLNTQTFRYHDWQEPPTTGYKPQNLLWFYGAENGSPVDPNNTIVSNLIYLGGTGPYEKGTPIKTNISNYFSEPKLWGNIFHDDYTSGTSPVFVTNKSPSEIKTAWNTIKDLTVKASGVFTLRTIPLWLPCRYNPFADKATNNKIWLVSIHSDHTEWKPIDNPLLQRTDLPLWLLVWGWQDWQKKNQQTSQPDINYLTVISSPYISCYPKLDYYVLLDEGFWEGHSTYIESITDSDKKHWYPKNRFQIETLNLIANTGPGTVKLRENQAAEGHMVYRFNFKLGGCPAPMEKICDPSKQSKYPIPNNQQQTTSLQSPENPIQTYLYDFDERRGLLTERATKRIKQDHTSEKTVLPFTGAATDLPILQTTSQEESSSEEEEEQQAEKKLLQLRRKQHRLRERILQLLDIQNT

SEQ ID NO: 2555 - protein, 488 aa, synthetic construct
MTKEWQPKVIRKTHVKGTYPLFLCTKHRINNNMIQYLDSIAPEHYYGGGGFSIMQFSLQALYEEFIKAKNWWTNTNCFLPLVRYMGCSFKFYKTEFYDYIVLIERCYPLACTDEMYLSTQPSIMMLTRKCIFVPCKQNSKGKKPYKKVRVRPPSQMTTGWHFSQDLANMPLVVLKTSVCSFDRYYTDSTAKSTTIGFKTLNTQTFRYHDWQEPPTTGYKPQNLLWFYGAENGSPVDPNNTIVSNLIYLGGTGPYEKGTPIKTNISNYFSEPKLWGNIFHDDYTSGTSPVFVTNKSPSEIKTAWNTIKDLTVKASGVFTLRTIPLWLPCRYNPFADKATNNKIWLVSIHSDHTEWKPIDNPLLQRTDLPLWLLVWGWQDWQKKNQQTSQPDINYLTVISSPYISCYPKLDYYVLLDEGFWEGHSTYIESITDSDKKHWYPKNRFQIETLNLIANTGPGTVKLRENQAAEGHMVYRFNFKLGGCPAPMEK

SEQ ID NO: 2556 - protein, 478 aa, synthetic construct
MTKEWQPKVIRKTHVKGTYPLFLCTKHRINNNMIQYLDSIAPEHYYGGGGFSIMQFSLQALYEEFIKAKNWWTNTNCFLPLVRYMGCSFKFYKTEFYDYIVLIERCYPLACTDEMYLSTQPSIMMLTRKCIFVPCKQNSKGKKPYKKVRVRPPSQMTTGWHFSQDLANMPLVVLKTSVCSFDRYYTDSTAKSTTIGFKTLNTQTFRYHDWQEPPTTGYKPQNLLWFYGAENGSPVDPNNTIVSNLIYLGGTGPYEKGTPIKTNISNYFSEPKLWGNIFHDDYTSGTSPVFVTNKSPSEIKTAWNTIKDLTVKASGVFTLRTIPLWLPCRYNPFADKATNNKIWLVSIHSDHTEWKPIDNPLLQRTDLPLWLLVWGWQDWQKKNQQTSQPDINYLTVISSPYISCYPKLDYYVLLDEGFWEGHSTYIESITDSDKKHWYPKNRFQIETLNLIANTGPGTVKLRENQAAEGHMVYRFNFK

SEQ ID NO: 2557 - protein, 622 aa, synthetic construct
MLKQWQPPYKRTSYIKGQDSLIYYSNLRLGMNSTMYEKSIVPVHWPGGGSFSVSMLTLDALYDIHKLSRNWWTSTNQDLPLVRYKGSKITFYQSTFTDYIVRIHTELPANSNKLTYPNTHPLMMMMSKYKHIIPSRQTRRKKKPYTKIFVKPPPQFENKWYFATDLYKIPLLQIHSTASNLQNPFVKPDKLSNNVTLWSLNTISIQNRNMSVDQGQSWPFKILGTQSFYFYFYTGANLPGDTTQIPVADLLPLTNPRINRPGQSLNEAKITDHITFTEYKNKFTNYWGNPFNKHIQEHLDMILYSLKSPEAIKNEWTTENMKWNQLNNAGTMALTPFNEPIFTQIQYNPDRDTGEDTQLYLLSNATGTGWDPPGIPELILEGFPLWLIYWGFADFQKNLKKVTNIDTNYMLVAKTKFTQKPGTFYLVILNDTFVEGNSPYEKQPLPEDNIKWYPQVQYQLEAQNKLLQTGPFTPNIQGQLSDNISMFYKFYFKWGGSPPKAINVENPAHQIQYPIPRNEHETTSLQSPGEAPESILYSFDYRHGNYTTTALSRISQDWALKDTVSKITEPDRQQLLKQALESLQISEETQEKKEKEVQQLISNLRQQQQLYRERIISLLKDQ

SEQ ID NO: 2558 - protein, 622 aa, synthetic construct
MIVEWQPKSIRKSRIKGMLSLFQTTEDRLSYNFDMYEESIIPEKLPGGGGFSIKNISLYALYQEHIHAHNIFTHTNTDRPLARYTGSSLKFYQSKDIDYVVTYSTSLPLRSSMGMYNSMQPSIHLMQQNKLIVPSKQTQKRRKPYIKKHISPPTQMKSQWYFQHNIANIPLLMIRTTALTLDNYYIGSRQLSTNVTIHTLNTTYIQNRDWGDRNKTYYSQTLGTQRYFLYGTHSTAQNINDIKLQELIPLTNTQDYVQGFDWTEKDKHNITTYKEFLTKGAGNPFHAEWITAQNPVIHTANSPTQIEQIYTASTTTFQNKKLTDLPTPGYIFITPTVSLRYNPYKDLAERNKSYFVRSKINAHGWDPEQHQELINSDLPQWLLLFGYPDYIKRTQNFALVDTNYILVDHSPYTNPEKTPFIPLSTSFIEGRSPYSPSDTHEPDEEDQNRWYPSYQYQQESINSISLSGPGTPKIPKGITAEAKVKYSFNFKWGGDLPPMSTITNPTDQPTYVVPNNFNETTSLQNPTTRPEHFLYSFDERRGQLTEKATKRLLKDWETKETSLLSTEYRFAEPTQTQAPQEDPSSEEEEESNLFERLLRQRTKQLQLKRRIIQTLKDLQKLE

SEQ ID NO: 2559 - protein, 622 aa, synthetic construct
MIVEWQPKSIRKARIKGMLSLFQTTEDRLSYNFDMYEESIIPEKLPGGGGFSIKNISLYALYQEHIHAHNIFTHTNTDRPLARYTGASLKFYQSKDIDYVVTYSTSLPLRSSMGMYNSMQPSIHLMQQNKLIVPSKQTQKRRKPYIKKHISPPTQMKSQWYFQHNIANIPLLMIRTTALTLDNYYIGSRQLSTNVTIHTLNTTYIQNRDWGDRNKTYYAQTLGTQRYFLYGTHSTAQNINDIKLQELIPLTNTQDYVQGFDWTEKDKHNITTYKEFLTKGAGNPFHAEWITAQNPVIHTANSPTQIEQIYTASTTTFQNKKLTDLPTPGYIFITPTVSLRYNPYKDLAERNKAYFVRSKINAHGWDPEQHQELINSDLPQWLLLFGYPDYIKRTQNFALVDTNYILVDHAPYTNPEKTPFIPLSTSFIEGRSPYSPSDTHEPDEEDQNRWYPAYQYQQESINSIALSGPGTPKIPKGITAEAKVKYSFNFKWGGDLPPMSTITNPTDQPTYVVPNNFNETTSLQNPTTRPEHFLYSFDERRGQLTEKATKRLLKDWETKETSLLSTEYRFAEPTQTQAPQEDPSSEEEEESNLFERLLRQRTKQLQLKRRIIQTLKDLQKLE

SEQ ID NO: 2560 - protein, 622 aa, synthetic construct
MIVEWQPKSIRKARIKGMLSLFQTTEDRLSYNFDMYEESIIPEKLPGGGGFSIKNISLYALYQEHIHAHNIFTHTNTDRPLARYTGASLKFYQSKDIDYVVTYSTSLPLRSSMGMYNSMQPSIHLMQQNKLIVPSKQTQKRRKPYIKKHISPPTQMKSQWYFQHNIANIPLLMIRTTALTLDNYYIGSRQLSTNVTIHTLNTTYIQNRDWGDRNKTYYAQTLGTQRYFLYGTHSTAQNINDIKLQELIPLTNTQDYVQGFDWTEKDKHNITTYKEFLTKGAGNPFHAEWITAQNPVIHTANSPTQIEQIYTASTCTFQNKKLTDLPTPGYIFITPTVSLRYNPYKDLAERNKAYFVRSKINAHGWDPEQHQELINSDLPQWLLLFGYPDYIKRTQNFALVDTNYILVDHAPYTNPEKTPFIPLSTSFIEGRSPYSPSDTHEPDEEDQNRWYPAYQYQQESINSIALSGPGTPKIPKGITAEAKVKYSFNFKWGGDLPPMSTITNPTDQPTYVVPNNFNETTSLQNPTTRPEHFLYSFDERRGQLTEKATKRLLKDWETKETSLLSTEYRFAEPTQTQAPQEDPSSEEEEESNLFERLLRQRTKQLQLKRRIIQTLKDLQKLE

SEQ ID NO: 2561 - protein, 622 aa, synthetic construct
MIVEWQPKSIRKSRIKGMLSLFQTTEDRLSYNFDMYEESIIPEKLPGGGGFSIKNISLYALYQEHIHAHNIFTHTNTDRPLARYTGSSLKFYQSKDIDYVVTYSTSLPLRSSMGMYNSMQPSIHLMQQNKLIVPSKQTQKRRKPYIKKHISPPTQMKSQWYFQHNIANIPLLMIRTTALTLDNYYIGSRQLSTNVTIHTLNTTYIQNRDWGDRNKTYYSQTLGTQRYFLYGTHSTAQNINDIKLQELIPLTNTQDYVQGFDWTEKDKHNITTYKEFLTKGAGNPFHAEWITAQNPVIHTANSPTQIEQIYTASTCTFQNKKLTDLPTPGYIFITPTVSLRYNPYKDLAERNKSYFVRSKINAHGWDPEQHQELINSDLPQWLLLFGYPDYIKRTQNFALVDTNYILVDHSPYTNPEKTPFIPLSTSFIEGRSPYSPSDTHEPDEEDQNRWYPSYQYQQESINSISLSGPGTPKIPKGITAEAKVKYSFNFKWGGDLPPMSTITNPTDQPTYVVPNNFNETTSLQNPTTRPEHFLYSFDERRGQLTEKATKRLLKDWETKETSLLSTEYRFAEPTQTQAPQEDPSSEEEEESNLFERLLRQRTKQLQLKRRIIQTLKDLQKLE

SEQ ID NO: 2562 - protein, 622 aa, synthetic construct
MIVEWQPKSIRKSRIKGMLSLFQTTEDRLSYNFDMYEESIIPEKLPGGGGFSIKNISLYALYQEHIHAHNIFTHTNTDRPLARYTGSSLKFYQSKDIDYVVTYSTSLPLRSSMGMYNSMQPSIHLMQQNKLIVPSKQTQKRRKPYIKKHISPPTQMKSQWYFQHNIANIPLLMIRTTALTLDNYYIGSRQLSTNVTIHTLNTTYIQNRDWGDRNKTYYSQTLGTQRYFLYGTHCTAQNINDIKLQELIPLTNTQDYVQGFDWTEKDKHNITTYKEFLTKGAGNPFHAEWITAQNPVIHTANSPTQIEQIYTASTTTFQNKKLTDLPTPGYIFITPTVSLRYNPYKDLAERNKSYFVRSKINAHGWDPEQHQELINSDLPQWLLLFGYPDYIKRTQNFALVDTNYILVDHSPYTNPEKTPFIPLSTSFIEGRSPYSPSDTHEPDEEDQNRWYPSYQYQQESINSISLSGPGTPKIPKGITAEAKVKYSFNFKWGGDLPPMSTITNPTDQPTYVVPNNFNETTSLQNPTTRPEHFLYSFDERRGQLTEKATKRLLKDWETKETSLLSTEYRFAEPTQTQAPQEDPSSEEEEESNLFERLLRQRTKQLQLKRRIIQTLKDLQKLE

SEQ ID NO: 2563 - protein, 622 aa, synthetic construct
MIVEWQPKSIRKSRIKGMLSLFQTTEDRLSYNFDMYEESIIPEKLPGGGGFSIKNISLYALYQEHIHAHNIFTHTNTDRPLARYTGSSLKFYQSKDIDYVVTYSTSLPLRSSMGMYNSMQPSIHLMQQNKLIVPSKQTQKRRKPYIKKHISPPTQMKSQWYFQHNIANIPLLMIRTTALTLDNYYIGSRQLSTNVTIHTLNTTYIQNRDWGDRNKTYYSQTLGTQRYFLYGTHSTAQNICDIKLQELIPLTNTQDYVQGFDWTEKDKHNITTYKEFLTKGAGNPFHAEWITAQNPVIHTANSPTQIEQIYTASTTTFQNKKLTDLPTPGYIFITPTVSLRYNPYKDLAERNKSYFVRSKINAHGWDPEQHQELINSDLPQWLLLFGYPDYIKRTQNFALVDTNYILVDHSPYTNPEKTPFIPLSTSFIEGRSPYSPSDTHEPDEEDQNRWYPSYQYQQESINSISLSGPGTPKIPKGITAEAKVKYSFNFKWGGDLPPMSTITNPTDQPTYVVPNNFNETTSLQNPTTRPEHFLYSFDERRGQLTEKATKRLLKDWETKETSLLSTEYRFAEPTQTQAPQEDPSSEEEEESNLFERLLRQRTKQLQLKRRIIQTLKDLQKLE

SEQ ID NO: 2564 - protein, 622 aa, synthetic construct
MIVEWQPKSIRKSRIKGMLSLFQTTEDRLSYNFDMYEESIIPEKLPGGGGFSIKNISLYALYQEHIHAHNIFTHTNTDRPLARYTGSSLKFYQSKDIDYVVTYSTSLPLRSSMGMYNSMQPSIHLMQQNKLIVPSKQTQKRRKPYIKKHISPPTQMKSQWYFQHNIANIPLLMIRTTALTLDNYYIGSRQLSTNVTIHTLNTTYIQNRDWGDRNKTYYSQTLGTQRYFLYGTHSTAQNINDIKLQELIPLTNTQDYVQGFDWTEKDCHNITTYKEFLTKGAGNPFHAEWITAQNPVIHTANSPTQIEQIYTASTTTFQNKKLTDLPTPGYIFITPTVSLRYNPYKDLAERNKSYFVRSKINAHGWDPEQHQELINSDLPQWLLLFGYPDYIKRTQNFALVDTNYILVDHSPYTNPEKTPFIPLSTSFIEGRSPYSPSDTHEPDEEDQNRWYPSYQYQQESINSISLSGPGTPKIPKGITAEAKVKYSFNFKWGGDLPPMSTITNPTDQPTYVVPNNFNETTSLQNPTTRPEHFLYSFDERRGQLTEKATKRLLKDWETKETSLLSTEYRFAEPTQTQAPQEDPSSEEEEESNLFERLLRQRTKQLQLKRRIIQTLKDLQKLE

SEQ ID NO: 2565 - protein, 622 aa, synthetic construct
MIVEWQPKSIRKSRIKGMLSLFQTTEDRLSYNFDMYEESIIPEKLPGGGGFSIKNISLYALYQEHIHAHNIFTHTNTDRPLARYTGSSLKFYQSKDIDYVVTYSTSLPLRSSMGMYNSMQPSIHLMQQNKLIVPSKQTQKRRKPYIKKHISPPTQMKSQWYFQHNIANIPLLMIRTTALTLDNYYIGSRQLSTNVTIHTLNTTYIQNRDWGDRNKTYYSQTLGTQRYFLYGTHSTAQNINDIKLQELIPLTNTQDYVQGFDWTEKDKHNITTYCEFLTKGAGNPFHAEWITAQNPVIHTANSPTQIEQIYTASTTTFQNKKLTDLPTPGYIFITPTVSLRYNPYKDLAERNKSYFVRSKINAHGWDPEQHQELINSDLPQWLLLFGYPDYIKRTQNFALVDTNYILVDHSPYTNPEKTPFIPLSTSFIEGRSPYSPSDTHEPDEEDQNRWYPSYQYQQESINSISLSGPGTPKIPKGITAEAKVKYSFNFKWGGDLPPMSTITNPTDQPTYVVPNNFNETTSLQNPTTRPEHFLYSFDERRGQLTEKATKRLLKDWETKETSLLSTEYRFAEPTQTQAPQEDPSSEEEEESNLFERLLRQRTKQLQLKRRIIQTLKDLQKLE

SEQ ID NO: 2566 - protein, 622 aa, synthetic construct
MIVEWQPKSIRKSRIKGMLSLFQTTEDRLSYNFDMYEESIIPEKLPGGGGFSIKNISLYALYQEHIHAHNIFTHTNTDRPLARYTGSSLKFYQSKDIDYVVTYSTSLPLRSSMGMYNSMQPSIHLMQQNKLIVPSKQTQKRRKPYIKKHISPPTQMKSQWYFQHNIANIPLLMIRTTALTLDNYYIGSRQLSTNVTIHTLNTTYIQNRDWGDRNKTYYSQTLGTQRYFLYGTHSTAQNINDIKLQELIPLTNTQDYVQGFDWTEKDKHNITTYKEFLTKGAGNPFHAEWITAQNPVIHTANSPTQIEQIYTCSTTTFQNKKLTDLPTPGYIFITPTVSLRYNPYKDLAERNKSYFVRSKINAHGWDPEQHQELINSDLPQWLLLFGYPDYIKRTQNFALVDTNYILVDHSPYTNPEKTPFIPLSTSFIEGRSPYSPSDTHEPDEEDQNRWYPSYQYQQESINSISLSGPGTPKIPKGITAEAKVKYSFNFKWGGDLPPMSTITNPTDQPTYVVPNNFNETTSLQNPTTRPEHFLYSFDERRGQLTEKATKRLLKDWETKETSLLSTEYRFAEPTQTQAPQEDPSSEEEEESNLFERLLRQRTKQLQLKRRIIQTLKDLQKLE

SEQ ID NO: 2567 - protein, 622 aa, synthetic construct
MIVEWQPKSIRKSRIKGMLSLFQTTEDRLSYNFDMYEESIIPEKLPGGGGFSIKNISLYALYQEHIHAHNIFTHTNTDRPLARYTGSSLKFYQSKDIDYVVTYSTSLPLRSSMGMYNSMQPSIHLMQQNKLIVPSKQTQKRRKPYIKKHISPPTQMKSQWYFQHNIANIPLLMIRTTALTLDNYYIGSRQLSTNVTIHTLNTTYIQNRDWGDRNKTYYSQTLGTQRYFLYGTHSTAQNINDIKLQELIPLTNTQDYVQGFDWTEKDKHNITTYKEFLTKGAGNPFHAEWITAQNPVIHTANSPTQIEQIYTACTTTFQNKKLTDLPTPGYIFITPTVSLRYNPYKDLAERNKSYFVRSKINAHGWDPEQHQELINSDLPQWLLLFGYPDYIKRTQNFALVDTNYILVDHSPYTNPEKTPFIPLSTSFIEGRSPYSPSDTHEPDEEDQNRWYPSYQYQQESINSISLSGPGTPKIPKGITAEAKVKYSFNFKWGGDLPPMSTITNPTDQPTYVVPNNFNETTSLQNPTTRPEHFLYSFDERRGQLTEKATKRLLKDWETKETSLLSTEYRFAEPTQTQAPQEDPSSEEEEESNLFERLLRQRTKQLQLKRRIIQTLKDLQKLE

SEQ ID NO: 2568 - protein, 622 aa, synthetic construct
MIVEWQPKSIRKSRIKGMLSLFQTTEDRLSYNFDMYEESIIPEKLPGGGGFSIKNISLYALYQEHIHAHNIFTHTNTDRPLARYTGSSLKFYQSKDIDYVVTYSTSLPLRSSMGMYNSMQPSIHLMQQNKLIVPSKQTQKRRKPYIKKHISPPTQMKSQWYFQHNIANIPLLMIRTTALTLDNYYIGSRQLSTNVTIHTLNTTYIQNRDWGDRNKTYYSQTLGTQRYFLYGTHSTAQNINDIKLQELIPLTNTQDYVQGFDWTEKDKHNITTYKEFLTKGAGNPFHAEWITAQNPVIHTANSPTQIEQIYTASTTTFQCKKLTDLPTPGYIFITPTVSLRYNPYKDLAERNKSYFVRSKINAHGWDPEQHQELINSDLPQWLLLFGYPDYIKRTQNFALVDTNYILVDHSPYTNPEKTPFIPLSTSFIEGRSPYSPSDTHEPDEEDQNRWYPSYQYQQESINSISLSGPGTPKIPKGITAEAKVKYSFNFKWGGDLPPMSTITNPTDQPTYVVPNNFNETTSLQNPTTRPEHFLYSFDERRGQLTEKATKRLLKDWETKETSLLSTEYRFAEPTQTQAPQEDPSSEEEEESNLFERLLRQRTKQLQLKRRIIQTLKDLQKLE

SEQ ID NO: 2569 - protein, 622 aa, synthetic construct
MIVEWQPKSIRKSRIKGMLSLFQTTEDRLSYNFDMYEESIIPEKLPGGGGFSIKNISLYALYQEHIHAHNIFTHTNTDRPLARYTGSSLKFYQSKDIDYVVTYSTSLPLRSSMGMYNSMQPSIHLMQQNKLIVPSKQTQKRRKPYIKKHISPPTQMKSQWYFQHNIANIPLLMIRTTALTLDNYYIGSRQLSTNVTIHTLNTTYIQNRDWGDRNKTYYSQTLGTQRYFLYGTHSTAQNINDIKLQELIPLTNTQDYVQGFDWTEKDKHNITTYKEFLTKGAGNPFHAEWITAQNPVIHTANSPTQIEQIYTASTTTFQNKCLTDLPTPGYIFITPTVSLRYNPYKDLAERNKSYFVRSKINAHGWDPEQHQELINSDLPQWLLLFGYPDYIKRTQNFALVDTNYILVDHSPYTNPEKTPFIPLSTSFIEGRSPYSPSDTHEPDEEDQNRWYPSYQYQQESINSISLSGPGTPKIPKGITAEAKVKYSFNFKWGGDLPPMSTITNPTDQPTYVVPNNFNETTSLQNPTTRPEHFLYSFDERRGQLTEKATKRLLKDWETKETSLLSTEYRFAEPTQTQAPQEDPSSEEEEESNLFERLLRQRTKQLQLKRRIIQTLKDLQKLE

SEQ ID NO: 2570 - protein, 622 aa, synthetic construct
MIVEWQPKSIRKSRIKGMLSLFQTTEDRLSYNFDMYEESIIPEKLPGGGGFSIKNISLYALYQEHIHAHNIFTHTNTDRPLARYTGSSLKFYQSKDIDYVVTYSTSLPLRSSMGMYNSMQPSIHLMQQNKLIVPSKQTQKRRKPYIKKHISPPTQMKSQWYFQHNIANIPLLMIRTTALTLDNYYIGSRQLSTNVTIHTLNTTYIQNRDWGDRNKTYYSQTLGTQRYFLYGTHSTACNINDIKLQELIPLTNTQDYVQGFDWTEKDKHNITTYKEFLTKGAGNPFHAEWITAQNPVIHTANSPTQIEQIYTASTTTFQNKKLTDLPTPGYIFITPTVSLRYNPYKDLAERNKSYFVRSKINAHGWDPEQHQELINSDLPQWLLLFGYPDYIKRTQNFALVDTNYILVDHSPYTNPEKTPFIPLSTSFIEGRSPYSPSDTHEPDEEDQNRWYPSYQYQQESINSISLSGPGTPKIPKGITAEAKVKYSFNFKWGGDLPPMSTITNPTDQPTYVVPNNFNETTSLQNPTTRPEHFLYSFDERRGQLTEKATKRLLKDWETKETSLLSTEYRFAEPTQTQAPQEDPSSEEEEESNLFERLLRQRTKQLQLKRRIIQTLKDLQKLE

SEQ ID NO: 2571 - protein, 672 aa, synthetic construct; identical to SEQ ID NO: 1012

SEQ ID NO: 2572 - protein, 707 aa, synthetic construct
MGSSHHHHHHGSDYKDDDDKSGSLEVLFQGPSGATMPWWYRRRSYNPWRRRNWFRRPRKTIYRRYRRRRRWVRRKPFYKRKIKRLNIVEWQPKSIRKCRIKGMLCLFQTTEDRLSYNFDMYEESIIPEKLPGGGGFSIKNISLYALYQEHIHAHNIFTHTNTDRPLARYTGCSLKFYQSKDIDYVVTYSTSLPLRSSMGMYNSMQPSIHLMQQNKLIVPSKQTQKRRKPYIKKHISPPTQMKSQWYFQHNIANIPLLMIRTTALTLDNYYIGSRQLSTNVTIHTLNTTYIQNRDWGDRNKTYYCQTLGTQRYFLYGTHSTAQNINDIKLQELIPLTNTQDYVQGFDWTEKDKHNITTYKEFLTKGAGNPFHAEWITAQNPVIHTANSPTQIEQIYTASTTTFQNKKLTDLPTPGYIFITPTVSLRYNPYKDLAERNKCYFVRSKINAHGWDPEQHQELINSDLPQWLLLFGYPDYIKRTQNFALVDTNYILVDHCPYTNPEKTPFIPLSTSFIEGRSPYSPSDTHEPDEEDQNRWYPCYQYQQESINSICLSGPGTPKIPKGITAEAKVKYSFNFKWGGDLPPMSTITNPTDQPTYVVPNNFNETTSLQNPTTRPEHFLYSFDERRGQLTEKATKRLLKDWETKETSLLSTEYRFAEPTQTQAPQEDPSSEEEEESNLFERLLRQRTKQLQLKRRIIQTLKDLQKLE

SEQ ID NO: 2573 - protein, 706 aa, synthetic construct
MPWWYRRRSYNPWRRRNWFRRPRKTIYRRYRRRRRWVRRKPFYKRKIKRLNIVEWQPKSIRKCRIKGMLCLFQTTEDRLSYNFDMYEESIIPEKLPGGGGFSIKNISLYALYQEHIHAHNIFTHTNTDRPLARYTGCSLKFYQSKDIDYVVTYSTSLPLRSSMGMYNSMQPSIHLMQQNKLIVPSKQTQKRRKPYIKKHISPPTQMKSQWYFQHNIANIPLLMIRTTALTLDNYYIGSRQLSTNVTIHTLNTTYIQNRDWGDRNKTYYCQTLGTQRYFLYGTHSTAQNINDIKLQELIPLTNTQDYVQGFDWTEKDKHNITTYKEFLTKGAGNPFHAEWITAQNPVIHTANSPTQIEQIYTASTTTFQNKKLTDLPTPGYIFITPTVSLRYNPYKDLAERNKCYFVRSKINAHGWDPEQHQELINSDLPQWLLLFGYPDYIKRTQNFALVDTNYILVDHCPYTNPEKTPFIPLSTSFIEGRSPYSPSDTHEPDEEDQNRWYPCYQYQQESINSICLSGPGTPKIPKGITAEAKVKYSFNFKWGGDLPPMSTITNPTDQPTYVVPNNFNETTSLQNPTTRPEHFLYSFDERRGQLTEKATKRLLKDWETKETSLLSTEYRFAEPTQTQAPQEDPSSEEEEESNLFERLLRQRTKQLQLKRRIIQTLKDLQKLEGSSHHHHHHGSDYKDDDDKSGSLEVLFQGPSGAT

SEQ ID NO: 2574 - protein, 596 aa, synthetic construct
MPWWYRRRSYNPWRRRNWFRRPRKTIYRRYRRRRRWVRRKPFYKRKIKRLNIVEWQPKSIRKCRIKGMLCLFQTTEDRLSYNFDMYEESIIPEKLPGGGGFSIKNISLYALYQEHIHAHNIFTHTNTDRPLARYTGCSLKFYQSKDIDYVVTYSTSLPLRSSMGMYNSMQPSIHLMQQNKLIVPSKQTQKRRKPYIKKHISPPTQMKSQWYFQHNIANIPLLMIRTTALTLDNYYIGSRQLSTNVTIHTLNTTYIQNRDWGDRNKTYYCQTLGTQRYFLYGTHSTAQNINDIKLQELIPLTNTQDYVQGFDWTEKDKHNITTYKEFLTKGAGNPFHAEWITAQNPVIHTANSPTQIEQIYTASTTTFQNKKLTDLPTPGYIFITPTVSLRYNPYKDLAERNKCYFVRSKINAHGWDPEQHQELINSDLPQWLLLFGYPDYIKRTQNFALVDTNYILVDHCPYTNPEKTPFIPLSTSFIEGRSPYSPSDTHEPDEEDQNRWYPCYQYQQESINSICLSGPGTPKIPKGITAEAKVKYSFNFKWGGDLPPMSTITNPTDQPTYVGSSHHHHHHGSDYKDDDDKSGSLEVLFQGPSGAT

SEQ ID NO: 2575 - protein, 854 aa, synthetic construct
MPWWYRRRSYNPWRRRNWFRRPRKTIYRRYRRRRRWVRRKPFYKRKIKRLNIVEWQPKSIRKCRIKGMLCLFQTTEDRLSYNFDMYEESIIPEKLPGGGGFSIKNISLYALYQEHIHAHNIFTHTNTDRPLARYTGCSLKFYQSKDIDYVVTYSTSLPLRSSMGMYNSMQPSIHLMQQNKLIVPSKQTQKRRKPYIKKHISPPTQMKSQWYFQHNIANIPLLMIRTTALTLDNYYIGSRQLSTNVTIHTLNTTYIQNRDWGDRNKTYYCQTLGTQRYFLYGTHSTAQNINDIKLQELIPLTNTQDYVQGFDWTEKDKHNITTYKEFLTKGAGNPFHAEWITAQNPVIHTANSPTQIEQIYTASTTTFQNKKLTDLPTPGYIFITPTVSLRYNPYKDLAERNKCYFVRSKINAHGWDPEQHQELINSDLPQWLLLFGYPDYIKRTQNFALVDTNYILVDHCPYTNPEKTPFIPLSTSFIEGRSPYSPSDTHEPDEEDQNRWYPCYQYQQESINSICLSGPGTPKIPKGITAEAKVKYSFNFKWGGDLPPMSTITNPTDQPTYVVPNNFNETTSLQNPTTRPEHFLYSFDERRGQLTEKATKRLLKDWETKETSLLSTEYRFAEPTQTQAPQEDPSSEEEEESNLFERLLRQRTKQLQLKRRIIQTLKDLQKLEMDKDCEMKRTTLDSPLGKLELSGCEQGLHRIIFLGKGTSAADAVEVPAPAAVLGGPEPLMQATAWLNAYFHQPEAIEEFPVPALHHPVFQQESFTRQVLWKLLKVVKFGEVISYSHLAALAGNPAATAAVKTALSGNPVPILIPCHRVVQGDLDVGGYEGGLAVKEWLLAHEGHRLGKPGLG

SEQ ID NO: 2576 - protein, 744 aa, synthetic construct
MPWWYRRRSYNPWRRRNWFRRPRKTIYRRYRRRRRWVRRKPFYKRKIKRLNIVEWQPKSIRKCRIKGMLCLFQTTEDRLSYNFDMYEESIIPEKLPGGGGFSIKNISLYALYQEHIHAHNIFTHTNTDRPLARYTGCSLKFYQSKDIDYVVTYSTSLPLRSSMGMYNSMQPSIHLMQQNKLIVPSKQTQKRRKPYIKKHISPPTQMKSQWYFQHNIANIPLLMIRTTALTLDNYYIGSRQLSTNVTIHTLNTTYIQNRDWGDRNKTYYCQTLGTQRYFLYGTHSTAQNINDIKLQELIPLTNTQDYVQGFDWTEKDKHNITTYKEFLTKGAGNPFHAEWITAQNPVIHTANSPTQIEQIYTASTTTFQNKKLTDLPTPGYIFITPTVSLRYNPYKDLAERNKCYFVRSKINAHGWDPEQHQELINSDLPQWLLLFGYPDYIKRTQNFALVDTNYILVDHCPYTNPEKTPFIPLSTSFIEGRSPYSPSDTHEPDEEDQNRWYPCYQYQQESINSICLSGPGTPKIPKGITAEAKVKYSFNFKWGGDLPPMSTITNPTDQPTYVMDKDCEMKRTTLDSPLGKLELSGCEQGLHRIIFLGKGTSAADAVEVPAPAAVLGGPEPLMQATAWLNAYFHQPEAIEEFPVPALHHPVFQQESFTRQVLWKLLKVVKFGEVISYSHLAALAGNPAATAAVKTALSGNPVPILIPCHRVVQGDLDVGGYEGGLAVKEWLLAHEGHRLGKPGLG

SEQ ID NO: 2577 - protein, 858 aa, synthetic construct
MPWWYRRRSYNPWRRRNWFRRPRKTIYRRYRRRRRWVRRKPFYKRKIKRLNIVEWQPKSIRKCRIKGMLCLFQTTEDRLSYNFDMYEESIIPEKLPGGGGFSIKNISLYALYQEHIHAHNIFTHTNTDRPLARYTGCSLKFYQSKDIDYVVTYSTSLPLRSSMGMYNSMQPSIHLMQQNKLIVPSKQTQKRRKPYIKKHISPPTQMKSQWYFQHNIANIPLLMIRTTALTLDNYYIGSRQLSTNVTIHTLNTTYIQNRDWGDRNKTYYCQTLGTQRYFLYGTHSTAQNINDIKLQELIPLTNTQDYVQGFDWTEKDKHNITTYKEFLTKGAGNPFHAEWITAQNPVIHTANSPTQIEQIYTASTTTFQNKKLTDLPTPGYIFITPTVSLRYNPYKDLAERNKCYFVRSKINAHGWDPEQHQELINSDLPQWLLLFGYPDYIKRTQNFALVDTNYILVDHCPYTNPEKTPFIPLSTSFIEGRSPYSPSDTHEPDEEDQNRWYPCYQYQQESINSICLSGPGTPKIPKGITAEAKVKYSFNFKWGGDLPPMSTITNPTDQPTYVMAEIGTGFPFDPHYVEVLGERMHYVDVGPRDGTPVLFLHGNPTSSYVWRNIIPHVAPTHRCIAPDLIGMGKSDKPDLGYFFDDHVRFMDAFIEALGLEEVVLVIHDWGSALGFHWAKRNPERVKGIAFMEFIRPIPTWDEWPEFARETFQAFRTTDVGRKLIIDQNVFIEGTLPMGVVRPLTEVEMDHYREPFLNPVDREPLWRFPNELPIAGEPANIVALVEEYMDWLHQSPVPKLLFWGTPGVLIPPAEAARLAKSLPNCKAVDIGPGLNLLQEDNPDLIGSEIARWLSTLEIS

SEQ ID NO: 2578 - protein, 744 aa, synthetic construct
MPWWYRRRSYNPWRRRNWFRRPRKTIYRRYRRRRRWVRRKPFYKRKIKRLNIVEWQPKSIRKCRIKGMLCLFQTTEDRLSYNFDMYEESIIPEKLPGGGGFSIKNISLYALYQEHIHAHNIFTHTNTDRPLARYTGCSLKFYQSKDIDYVVTYSTSLPLRSSMGMYNSMQPSIHLMQQNKLIVPSKQTQKRRKPYIKKHISPPTQMKSQWYFQHNIANIPLLMIRTTALTLDNYYIGSRQLSTNVTIHTLNTTYIQNRDWGDRNKTYYCQTLGTQRYFLYGTHSTAQNINDIKLQELIPLTNTQDYVQGFDWTEKDKHNITTYKEFLTKGAGNPFHAEWITAQNPVIHTANSPTQIEQIYTASTTTFQNKKLTDLPTPGYIFITPTVSLRYNPYKDLAERNKCYFVRSKINAHGWDPEQHQELINSDLPQWLLLFGYPDYIKRTQNFALVDTNYILVDHCPYTNPEKTPFIPLSTSFIEGRSPYSPSDTHEPDEEDQNRWYPCYQYQQESINSICLSGPGTPKIPKGITAEAKVKYSFNFKWGGDLPPMSTITNPTDQPTYVMDKDCEMKRTTLDSPLGKLELSGCEQGLHRIIFLGKGTSAADAVEVPAPAAVLGGPEPLIQATAWLNAYFHQPEAIEEFPVPALHHPVFQQESFTRQVLWKLLKVVKFGEVISESHLAALVGNPAATAAVNTALDGNPVPILIPCHRVVQGDSDVGPYLGGLAVKEWLLAHEGHRLGKPGLG

SEQ ID NO: 2579 - protein, 577 aa, synthetic construct
MPWWYRRRSYNPWRRRNWFRRPRKTIYRRYRRRRRWVRRKPFYKRKIKRLNIVEWQPKSIRKCRIKGMLCLFQTTEDRLSYNFDMYEESIIPEKLPGGGGFSIKNISLYALYQEHIHAHNIFTHTNTDRPLARYTGCSLKFYQSKDIDYVVTYSTSLPLRSSMGMYNSMQPSIHLMQQNKLIVPSKQTQKRRKPYIKKHISPPTQMKSQWYFQHNIANIPLLMIRTTALTLDNYYIGSRQLSTNVTIHTLNTTYIQNRDWGDRNKTYYCQTLGTQRYFLYGTHSGLNDIFEAQKIEWHETAQNINDIKLQELIPLTNTQDYVQGFDWTEKDKHNITTYKEFLTKGAGNPFHAEWITAQNPVIHTANSPTQIEQIYTASTTTFQNKKLTDLPTPGYIFITPTVSLRYNPYKDLAERNKCYFVRSKINAHGWDPEQHQELINSDLPQWLLLFGYPDYIKRTQNFALVDTNYILVDHCPYTNPEKTPFIPLSTSFIEGRSPYSPSDTHEPDEEDQNRWYPCYQYQQESINSICLSGPGTPKIPKGITAEAKVKYSFNFKWGGDLPPMSTITNPTDQPTYV

SEQ ID NO: 2580 - protein, 531 aa, synthetic construct
MKRLNIVEWQPKSIRKCRIKGMLCLFQTTEDRLSYNFDMYEESIIPEKLPGGGGFSIKNISLYALYQEHIHAHNIFTHTNTDRPLARYTGCSLKFYQSKDIDYVVTYSTSLPLRSSMGMYNSMQPSIHLMQQNKLIVPSKQTQKRRKPYIKKHISPPTQMKSQWYFQHNIANIPLLMIRTTALTLDNYYIGSRQLSTNVTIHTLNTTYIQNRDWGDRNKTYYCQTLGTQRYFLYGTHSGLNDIFEAQKIEWHETAQNINDIKLQELIPLTNTQDYVQGFDWTEKDKHNITTYKEFLTKGAGNPFHAEWITAQNPVIHTANSPTQIEQIYTASTTTFQNKKLTDLPTPGYIFITPTVSLRYNPYKDLAERNKCYFVRSKINAHGWDPEQHQELINSDLPQWLLLFGYPDYIKRTQNFALVDTNYILVDHCPYTNPEKTPFIPLSTSFIEGRSPYSPSDTHEPDEEDQNRWYPCYQYQQESINSICLSGPGTPKIPKGITAEAKVKYSFNFKWGGDLPPMSTITNPTDQPTYV

SEQ ID NO: 2581 - protein, 577 aa, synthetic construct
MPWWYRRRSYNPWRRRNWFRRPRKTIYRRYRRRRRWVRRKPFYKRKIKRLNIVEWQPKSIRKCRIKGMLCLFQTTEDRLSYNFDMYEESIIPEKLPGGGGFSIKNISLYALYQEHIHAHNIFTHTNTDRPLARYTGCSLKFYQSKDIDYVVTYSTSLPLRSSMGMYNSMQPSIHLMQQNKLIVPSKQTQKRRKPYIKKHISPPTQMKSQWYFQHNIANIPLLMIRTTALTLDNYYIGSRQLSTNVTIHTLNTTYIQNRDWGDRNKTYYCQTLGTQRYFLYGTHSTAQNINDIKLQELIPLTNTQDYVQGFDWTEKDKHNITTYKEFLGLNDIFEAQKIEWHETKGAGNPFHAEWITAQNPVIHTANSPTQIEQIYTASTTTFQNKKLTDLPTPGYIFITPTVSLRYNPYKDLAERNKCYFVRSKINAHGWDPEQHQELINSDLPQWLLLFGYPDYIKRTQNFALVDTNYILVDHCPYTNPEKTPFIPLSTSFIEGRSPYSPSDTHEPDEEDQNRWYPCYQYQQESINSICLSGPGTPKIPKGITAEAKVKYSFNFKWGGDLPPMSTITNPTDQPTYV

SEQ ID NO: 2582 - protein, 531 aa, synthetic construct
MKRLNIVEWQPKSIRKCRIKGMLCLFQTTEDRLSYNFDMYEESIIPEKLPGGGGFSIKNISLYALYQEHIHAHNIFTHTNTDRPLARYTGCSLKFYQSKDIDYVVTYSTSLPLRSSMGMYNSMQPSIHLMQQNKLIVPSKQTQKRRKPYIKKHISPPTQMKSQWYFQHNIANIPLLMIRTTALTLDNYYIGSRQLSTNVTIHTLNTTYIQNRDWGDRNKTYYCQTLGTQRYFLYGTHSTAQNINDIKLQELIPLTNTQDYVQGFDWTEKDKHNITTYKEFLGLNDIFEAQKIEWHETKGAGNPFHAEWITAQNPVIHTANSPTQIEQIYTASTTTFQNKKLTDLPTPGYIFITPTVSLRYNPYKDLAERNKCYFVRSKINAHGWDPEQHQELINSDLPQWLLLFGYPDYIKRTQNFALVDTNYILVDHCPYTNPEKTPFIPLSTSFIEGRSPYSPSDTHEPDEEDQNRWYPCYQYQQESINSICLSGPGTPKIPKGITAEAKVKYSFNFKWGGDLPPMSTITNPTDQPTYV

SEQ ID NO: 2583 - protein, 534 aa, synthetic construct
MKRLNIVEWQPKSIRKCRIKGMLCLFQTTEDRLSYNFDMYEESIIPEKLPGGGGFSIKNISLYALYQEHIHAHNIFTHTNTDRPLARYTGCSLKFYQSKDIDYVVTYSTSLPLRSSMGMYNSMQPSIHLMQQNKLIVPSKQTQKRRKPYIKKHISPPTQMKSQWYFQHNIANIPLLMIRTTALTLDNYYIGSRQLSTNVTIHTLNTTYIANLDKMLNTTVTEVRQFLQVDRVCVFQFEEDYSGVVVVEAVDDRWISILKTQVRDRYFMETRGEEYSHGRYQAIADIYTANLTECYRDLLTQFQVRAILAVPILQGKKLWGLLVAHQLAAPRQWQTWEIDFLKQQAVVVGIAIQQSTPTVSLRYNPYKDLAERNKCYFVRSKINAHGWDPEQHQELINSDLPQWLLLFGYPDYIKRTQNFALVDTNYILVDHCPYTNPEKTPFIPLSTSFIEGRSPYSPSDTHEPDEEDQNRWYPCYQYQQESINSICLSGPGTPKIPKGITAEAKVKYSFNFKWGGDLPPMSTITNPTDQPTYV

SEQ ID NO: 2584 - protein, 511 aa, synthetic construct
MKRLNIVEWQPKSIRKCRIKGMLCLFQTTEDRLSYNFDMYEESIIPEKLPGGGGFSIKNISLYALYQEHIHAHNIFTHTNTDRPLARYTGCSLKFYQSKDIDYVVTYSTSLPLRSSMGMYNSMQPSIHLMQQNKLIVPSKQTQKRRKPYIKKHISPPTQMKSQWYFQHNIANIPLLMIRTTALTLDNYYIGSRQLSTNVTIHTLNTTYIGGGGSVTTLSGLSGEQGPSGDMTTEEDSATHIKFSKRDEDGRELAGATMELRDSSGKTISTWISDGHVKDFYLYPGKYTFVETAAPDGYEVATPIEFTVNEDGQVTVDGEATEGDAHTGGGGSTPTVSLRYNPYKDLAERNKCYFVRSKINAHGWDPEQHQELINSDLPQWLLLFGYPDYIKRTQNFALVDTNYILVDHCPYTNPEKTPFIPLSTSFIEGRSPYSPSDTHEPDEEDQNRWYPCYQYQQESINSICLSGPGTPKIPKGITAEAKVKYSFNFKWGGDLPPMSTITNPTDQPTYV

SEQ ID NO: 2585 - protein, 799 aa, synthetic construct
MPWWYRRRSYNPWRRRNWFRRPRKTIYRRYRRRRRWVRRKPFYKRKIKRLNIVEWQPKSIRKCRIKGMLCLFQTTEDRLSYNFDMYEESIIPEKLPGGGGFSIKNISLYALYQEHIHAHNIFTHTNTDRPLARYTGCSLKFYQSKDIDYVVTYSTSLPLRSSMGMYNSMQPSIHLMQQNKLIVPSKQTQKRRKPYIKKHISPPTQMKSQWYFQHNIANIPLLMIRTTALTLDNYYIGSRQLSTNVTIHTLNTTYIQNRDWGDRNKTYYCQTLGTQRYFLYGTHSTAQNINDIKLQELIPLTNTQDYVQGFDWTEKDKHNITTYKEFLTKGAGNPFHAEWITAQNPVIHTANSPTQIEQIYTASTTTFQNKKLTDLPTPGYIFITPTVSLRYNPYKDLAERNKCYFVRSKINAHGWDPEQHQELINSDLPQWLLLFGYPDYIKRTQNFALVDTNYILVDHCPYTNPEKTPFIPLSTSFIEGRSPYSPSDTHEPDEEDQNRWYPCYQYQQESINSICLSGPGTPKIPKGITAEAKVKYSFNFKWGGDLPPMSTITNPTDQPTYVSKGEELFTGVVPILVELDGDVNGHKFSVSGEGEGDATYGKLTLKFICTTGKLPVPWPTLVTTLTYGVQCFSRYPDHMKQHDFFKSAMPEGYVQERTIFFKDDGNYKTRAEVKFEGDTLVNRIELKGIDFKEDGNILGHKLEYNYNSHNVYIMADKQKNGIKVNFKIRHNIEDGSVQLADHYQQNTPIGDGPVLLPDNHYLSTQSALSKDPNEKRDHMVLLEFVTAAGITLGMDELYK

SEQ ID NO: 2586 - protein, 673 aa, synthetic construct
MIVEWQPKSIRKCRIKGMLCLFQTTEDRLSYNFDMYEESIIPEKLPGGGGFSIKNISLYALYQEHIHAHNIFTHTNTDRPLARYTGCSLKFYQSKDIDYVVTYSTSLPLRSSMGMYNSMQPSIHLMQQNKLIVPSKQTQKRRKPYIKKHISPPTQMKSQWYFQHNIANIPLLMIRTTALTLDNYYIGSRQLSTNVTIHTLANPNANPNANPNANPNANPNANPNANPNANPNANPNANPNANPNANPNANPNANPNANPNKNNQGNGQGHNMPNDPNRNVDENANANSAVKNNNNEEPSDKHIKEYLNKIQNSLSTEWSPCSVTCGNGIQVRIKPGSANKPKDELDYANDIEKKICKMEKCSSVFNVVNSSIGLIMVLSFLFLNTPTVSLRYNPYKDLAERNKCYFVRSKINAHGWDPEQHQELINSDLPQWLLLFGYPDYIKRTQNFALVDTNYILVDHCPYTNPEKTPFIPLSTSFIEGRSPYSPSDTHEPDEEDQNRWYPCYQYQQESINSICLSGPGTPKIPKGITAEAKVKYSFNFKWGGDLPPMSTITNPTDQPTYVVPNNFNETTSLQNPTTRPEHFLYSFDERRGQLTEKATKRLLKDWETKETSLLSTEYRFAEPTQTQAPQEDPSSEEEEESNLFERLLRQRTKQLQLKRRIIQTLKDLQKLE

SEQ ID NO: 2587 - protein, 695 aa, synthetic construct
MIVEWQPKSIRKCRIKGMLCLFQTTEDRLSYNFDMYEESIIPEKLPGGGGFSIKNISLYALYQEHIHAHNIFTHTNTDRPLARYTGCSLKFYQSKDIDYVVTYSTSLPLRSSMGMYNSMQPSIHLMQQNKLIVPSKQTQKRRKPYIKKHISPPTQMKSQWYFQHNIANIPLLMIRTTALTLDNYYIGSRQLSTNVTIHTLNTTYIQNRDWGDRNKTYYCQTLGTQRYFLYGTHSTAQNINDIKLQELIPLTNTQDYVQGFDWTEKDKHNITTYKEFLTKGAGNPFHAEWITAQNPVIHTANSPTQIEQIYTASTTTFQNKKLTDLPTPGYIFITPTVSLRYNPYKDLAERNKCYFVRSKINAHGWDPEQHQELINSDLPQWLLLFGYPDYIKRTQNFALVDTNYILVDHCPYTNPEKTPFIPLSTSFIEGRSPYSPSDTHEPDEEDQNRWYPCYQYQQESINSICLSGPGTPKIPKGITAEAKVKYSFNFKWGGDLPPMSTITNPTDQPTYVNPNANPNANPNANPNANPNANPNANPNANPNANPNANPNANPNANPNANPNANPNANPNKNNQGNGQGHNMPNDPNRNVDENANANSAVKNNNNEEPSDKHIKEYLNKIQNSLSTEWSPCSVTCGNGIQVRIKPGSANKPKDELDYANDIEKKICKMEKCSSVFNVVNSSIGLIMVLSFLFLN

SEQ ID NO: 2588 - protein, 561 aa, synthetic construct
MKIKRLNIVEWQPKSIRKCRIKGMLCLFQTTEDRLSYNFDMYEESIIPEKLPGGGGFSIKNISLYALYQEHIHAHNIFTHTNTDRPLARYTGCSLKFYQSKDIDYVVTYSTSLPLRSSMGMYNSMQPSIHLMQQNKLIVPSKQTQKRRKPYIKKHISPPTQMKSQWYFQHNIANIPLLMIRTTALTLDNYYIGSRQLSTNVTIHTLEPSDKHIKEYLNKIQNSLSTEWSPCSVTCGNGIQVRIKPGSANKPKDELDYANDIEKKICKMEKCSSPTVSLRYNPYKDLAERNKCYFVRSKINAHGWDPEQHQELINSDLPQWLLLFGYPDYIKRTQNFALVDTNYILVDHCPYTNPEKTPFIPLSTSFIEGRSPYSPSDTHEPDEEDQNRWYPCYQYQQESINSICLSGPGTPKIPKGITAEAKVKYSFNFKWGGDLPPMSTITNPTDQPTYVVPNNFNETTSLQNPTTRPEHFLYSFDERRGQLTEKATKRLLKDWETKETSLLSTEYRFAEPTQTQAPQEDPSSEEEEESNLFERLLRQRTKQLQLKRRIIQTLKDLQKLE

SEQ ID NO: 2589 - protein, 518 aa, synthetic construct
MKIKRLNIVEWQPKSIRKCRIKGMLCLFQTTEDRLSYNFDMYEESIIPEKLPGGGGFSIKNISLYALYQEHIHAHNIFTHTNTDRPLARYTGCSLKFYQSKDIDYVVTYSTSLPLRSSMGMYNSMQPSIHLMQQNKLIVPSKQTQKRRKPYIKKHISPPTQMKSQWYFQHNIANIPLLMIRTTALTLDNYYIGSRQLSTNVTIHTLNANPNANPNANPNANPNANPNANPPTVSLRYNPYKDLAERNKCYFVRSKINAHGWDPEQHQELINSDLPQWLLLFGYPDYIKRTQNFALVDTNYILVDHCPYTNPEKTPFIPLSTSFIEGRSPYSPSDTHEPDEEDQNRWYPCYQYQQESINSICLSGPGTPKIPKGITAEAKVKYSFNFKWGGDLPPMSTITNPTDQPTYVVPNNFNETTSLQNPTTRPEHFLYSFDERRGQLTEKATKRLLKDWETKETSLLSTEYRFAEPTQTQAPQEDPSSEEEEESNLFERLLRQRTKQLQLKRRIIQTLKDLQKLE

SEQ ID NO: 2590 - protein, 566 aa, synthetic construct; identical to SEQ ID NO: 2525

SEQ ID NO: 2591 - protein, 579 aa, synthetic construct
MKITTKEWQPKVIRKTHVKGTYPLFLCTKHRINNNMIQYLDSIAPEHYYGGGGFSIMQFSLQALYEEFIKAKNWWTNTNCFLPLVRYMGCSFKFYKTEFYDYIVLIERCYPLACTDEMYLSTQPSIMMLTRKCIFVPCKQNSKGKKPYKKVRVRPPSQMTTGWHFSQDLANMPLVVLKTSVCSFDRYYTDSTAKSTTIGFKTLNTQTFANLDKMLNTTVTEVRQFLQVDRVCVFQFEEDYSGVVVVEAVDDRWISILKTQVRDRYFMETRGEEYSHGRYQAIADIYTANLTECYRDLLTQFQVRAILAVPILQGKKLWGLLVAHQLAAPRQWQTWEIDFLKQQAVVVGIAIQQSPLWLPCRYNPFADKATNNKIWLVSIHSDHTEWKPIDNPLLQRTDLPLWLLVWGWQDWQKKNQQTSQPDINYLTVISSPYISCYPKLDYYVLLDEGFWEGHSTYIESITDSDKKHWYPKNRFQIETLNLIANTGPGTVKLRENQAAEGHMVYRFNFKLGGCPAPMEKICDPSKQSKYPIPNNQQQTTSLQSPENPIQTYLYDFDERRGLLTERATKRIKQDHTSEK

SEQ ID NO: 2592 - protein, 624 aa, synthetic construct
MPWYPRRRYPRRRYRWLRRWRARRPFRPRYRRRYWVRNYSRKRKLFKITTKEWQPKVIRKTHVKGTYPLFLCTKHRINNNMIQYLDSIAPEHYYGGGGFSIMQFSLQALYEEFIKAKNWWTNTNCFLPLVRYMGCSFKFYKTEFYDYIVLIERCYPLACTDEMYLSTQPSIMMLTRKCIFVPCKQNSKGKKPYKKVRVRPPSQMTTGWHFSQDLANMPLVVLKTSVCSFDRYYTDSTAKSTTIGFKTLNTQTFRYHDWQEPPTTGYKPQNLLWFYGAENGSPVDPNNTIVSNLIYLGGTGPYEKGTPIKTNISNYFSEPKLWGNIFHDDYTSGTSPVFVTNKSPSEIKTAWNTIKDLTVKASGVFTLRTIPLWLPCRYNPFADKATNNKIWLVSIHSDHTEWKPIDNPLLQRTDLPLWLLVWGWQDWQKKNQQTSQPDINYLTVISSPYISCYPKLDYYVLLDEGFWEGHSTYIESITDSDKKHWYPKNRFQIETLNLIANTGPGTVKLRENQAAEGHMVYRFNFKLGGCPAPMEKICDPSKQSKYPIPNNQQQTTSLQSPENPIQTYLYDFDERRGLLTERATKRIKQDHTSEKTVLPGSSGSALEVLFEGPGSHHHHHHHHH

SEQ ID NO: 2593 - protein, 636 aa, synthetic construct
MPWYPRRRYPRRRYRWLRRWRARRPFRPRYRRRYWVRNYSRKRKLFKITTKEWQPKVIRKTHVKGTYPLFLCTKHRINNNMIQYLDSIAPEHYYGGGGFSIMQFSLQALYEEFIKAKNWWTNTNCFLPLVRYMGCSFKFYKTEFYDYIVLIERCYPLACTDEMYLSTQPSIMMLTRKCIFVPCKQNSKGKKPYKKVRVRPPSQMTTGWHFSQDLANMPLVVLKTSVCSFDRYYTDSTAKSTTIGFKTLNTQTFRYHDWQEPPTTGYKPQNLLWFYGAENGSPVDPNNTIVSNLIYLGGTGPYEKGTPIKTNISNYFSEPKLWGNIFHDDYTSGTSPVFVTNKSPSEIKTAWNTIKDLTVKASGVFTLRTIPLWLPCRYNPFADKATNNKIWLVSIHSDHTEWKPIDNPLLQRTDLPLWLLVWGWQDWQKKNQQTSQPDINYLTVISSPYISCYPKLDYYVLLDEGFWEGHSTYIESITDSDKKHWYPKNRFQIETLNLIANTGPGTVKLRENQAAEGHMVYRFNFKLGGCPAPMEKICDPSKQSKYPIPNNQQQTTSLQSPENPIQTYLYDFDERRGLLTERATKRIKQDHTSEKTVLPGSSGSAGSSGSAGSSGSALEVLFEGPGSHHHHHHHHH

SEQ ID NO: 2594 - protein, 863 aa, synthetic construct
MPWYPRRRYPRRRYRWLRRWRARRPFRPRYRRRYWVRNYSRKRKLFKITTKEWQPKVIRKTHVKGTYPLFLCTKHRINNNMIQYLDSIAPEHYYGGGGFSIMQFSLQALYEEFIKAKNWWTNTNCFLPLVRYMGCSFKFYKTEFYDYIVLIERCYPLACTDEMYLSTQPSIMMLTRKCIFVPCKQNSKGKKPYKKVRVRPPSQMTTGWHFSQDLANMPLVVLKTSVCSFDRYYTDSTAKSTTIGFKTLNTQTFRYHDWQEPPTTGYKPQNLLWFYGAENGSPVDPNNTIVSNLIYLGGTGPYEKGTPIKTNISNYFSEPKLWGNIFHDDYTSGTSPVFVTNKSPSEIKTAWNTIKDLTVKASGVFTLRTIPLWLPCRYNPFADKATNNKIWLVSIHSDHTEWKPIDNPLLQRTDLPLWLLVWGWQDWQKKNQQTSQPDINYLTVISSPYISCYPKLDYYVLLDEGFWEGHSTYIESITDSDKKHWYPKNRFQIETLNLIANTGPGTVKLRENQAAEGHMVYRFNFKLGGCPAPMEKICDPSKQSKYPIPNNQQQTTSLQSPENPIQTYLYDFDERRGLLTERATKRIKQDHTSEKTVLPGSSGSALEVLFEGPGSMVSKGEELFTGVVPILVELDGDVNGHKFSVSGEGEGDATYGKLTLKFICTTGKLPVPWPTLVTTLTYGVQCFSRYPDHMKQHDFFKSAMPEGYVQERTIFFKDDGNYKTRAEVKFEGDTLVNRIELKGIDFKEDGNILGHKLEYNYNSHNVYIMADKQKNGIKVNFKIRHNIEDGSVQLADHYQQNTPIGDGPVLLPDNHYLSTQSALSKDPNEKRDHMVLLEFVTAAGITLGMDELYKHHHHHHHHH

SEQ ID NO: 2595 - protein, 875 aa, synthetic construct
MPWYPRRRYPRRRYRWLRRWRARRPFRPRYRRRYWVRNYSRKRKLFKITTKEWQPKVIRKTHVKGTYPLFLCTKHRINNNMIQYLDSIAPEHYYGGGGFSIMQFSLQALYEEFIKAKNWWTNTNCFLPLVRYMGCSFKFYKTEFYDYIVLIERCYPLACTDEMYLSTQPSIMMLTRKCIFVPCKQNSKGKKPYKKVRVRPPSQMTTGWHFSQDLANMPLVVLKTSVCSFDRYYTDSTAKSTTIGFKTLNTQTFRYHDWQEPPTTGYKPQNLLWFYGAENGSPVDPNNTIVSNLIYLGGTGPYEKGTPIKTNISNYFSEPKLWGNIFHDDYTSGTSPVFVTNKSPSEIKTAWNTIKDLTVKASGVFTLRTIPLWLPCRYNPFADKATNNKIWLVSIHSDHTEWKPIDNPLLQRTDLPLWLLVWGWQDWQKKNQQTSQPDINYLTVISSPYISCYPKLDYYVLLDEGFWEGHSTYIESITDSDKKHWYPKNRFQIETLNLIANTGPGTVKLRENQAAEGHMVYRFNFKLGGCPAPMEKICDPSKQSKYPIPNNQQQTTSLQSPENPIQTYLYDFDERRGLLTERATKRIKQDHTSEKTVLPGSSGSAGSSGSAGSSGSALEVLFEGPGSMVSKGEELFTGVVPILVELDGDVNGHKFSVSGEGEGDATYGKLTLKFICTTGKLPVPWPTLVTTLTYGVQCFSRYPDHMKQHDFFKSAMPEGYVQERTIFFKDDGNYKTRAEVKFEGDTLVNRIELKGIDFKEDGNILGHKLEYNYNSHNVYIMADKQKNGIKVNFKIRHNIEDGSVQLADHYQQNTPIGDGPVLLPDNHYLSTQSALSKDPNEKRDHMVLLEFVTAAGITLGMDELYKHHHHHHHHH

SEQ ID NO: 2596 - protein, 624 aa, synthetic construct
MPWYPRRRYPRRRYRWLRRWRARRPFRPRYRRRYWVRNYSRKRKLFKITTKEWQPKVIRKTHVKGTYPLFLCTKHRINNNMIQYLDSIAPEHYYGGGGFSIMQFSLQALYEEFIKAKNWWTNTNCFLPLVRYMGCSFKFYKTEFYDYIVLIERCYPLACTDEMYLSTQPSIMMLTRKCIFVPCKQNSKGKKPYKKVRVRPPSQMTTGWHFSQDLANMPLVVLKTSVCSFDRYYTDSTAKSTTIGFKTLNTQTFRYHDWQEPPTTGYKPQNLLWFYGAENGSPVDPNNTIVSNLIYLGGTGPYEKGTPIKTNISNYFSEPKLWGNIFHDDYTSGTSPVFVTNKSPSEIKTAWNTIKDLTVKASGVFTLRTIPLWLPCRYNPFADKATNNKIWLVSIHSDHTEWKPIDNPLLQRTDLPLWLLVWGWQDWQKKNQQTSQPDINYLTVISSPYISCYPKLDYYVLLDEGFWEGHSTYIESITDSDKKHWYPKNRFQIETLNLIANTGPGTVKLRENQAAEGHMVYRFNFKLGGCPAPMEKICDPSKQSKYPIPNNQQQTTSLQSPENPIQTYLYDFDERRGLLTERATKRIKQDHTSEKTVLPGSSGSALEVLFEGPGSYPYDVPDYA

SEQ ID NO: 2597 - protein, 636 aa, synthetic construct
MPWYPRRRYPRRRYRWLRRWRARRPFRPRYRRRYWVRNYSRKRKLFKITTKEWQPKVIRKTHVKGTYPLFLCTKHRINNNMIQYLDSIAPEHYYGGGGFSIMQFSLQALYEEFIKAKNWWTNTNCFLPLVRYMGCSFKFYKTEFYDYIVLIERCYPLACTDEMYLSTQPSIMMLTRKCIFVPCKQNSKGKKPYKKVRVRPPSQMTTGWHFSQDLANMPLVVLKTSVCSFDRYYTDSTAKSTTIGFKTLNTQTFRYHDWQEPPTTGYKPQNLLWFYGAENGSPVDPNNTIVSNLIYLGGTGPYEKGTPIKTNISNYFSEPKLWGNIFHDDYTSGTSPVFVTNKSPSEIKTAWNTIKDLTVKASGVFTLRTIPLWLPCRYNPFADKATNNKIWLVSIHSDHTEWKPIDNPLLQRTDLPLWLLVWGWQDWQKKNQQTSQPDINYLTVISSPYISCYPKLDYYVLLDEGFWEGHSTYIESITDSDKKHWYPKNRFQIETLNLIANTGPGTVKLRENQAAEGHMVYRFNFKLGGCPAPMEKICDPSKQSKYPIPNNQQQTTSLQSPENPIQTYLYDFDERRGLLTERATKRIKQDHTSEKTVLPGSSGSAGSSGSAGSSGSALEVLFEGPGSYPYDVPDYA

SEQ ID NO: 2598 - protein, 623 aa, synthetic construct
MPWYPRRRYPRRRYRWLRRWRARRPFRPRYRRRYWVRNYSRKRKLFKITTKEWQPKVIRKTHVKGTYPLFLCTKHRINNNMIQYLDSIAPEHYYGGGGFSIMQFSLQALYEEFIKAKNWWTNTNCFLPLVRYMGCSFKFYKTEFYDYIVLIERCYPLACTDEMYLSTQPSIMMLTRKCIFVPCKQNSKGKKPYKKVRVRPPSQMTTGWHFSQDLANMPLVVLKTSVCSFDRYYTDSTAKSTTIGFKTLNTQTFRYHDWQEPPTTGYKPQNLLWFYGAENGSPVDPNNTIVSNLIYLGGTGPYEKGTPIKTNISNYFSEPKLWGNIFHDDYTSGTSPVFVTNKSPSEIKTAWNTIKDLTVKASGVFTLRTIPLWLPCRYNPFADKATNNKIWLVSIHSDHTEWKPIDNPLLQRTDLPLWLLVWGWQDWQKKNQQTSQPDINYLTVISSPYISCYPKLDYYVLLDEGFWEGHSTYIESITDSDKKHWYPKNRFQIETLNLIANTGPGTVKLRENQAAEGHMVYRFNFKLGGCPAPMEKICDPSKQSKYPIPNNQQQTTSLQSPENPIQTYLYDFDERRGLLTERATKRIKQDHTSEKTVLPGSSGSALEVLFEGPGSDYKDDDDK

SEQ ID NO: 2599 - protein, 635 aa, synthetic construct
MPWYPRRRYPRRRYRWLRRWRARRPFRPRYRRRYWVRNYSRKRKLFKITTKEWQPKVIRKTHVKGTYPLFLCTKHRINNNMIQYLDSIAPEHYYGGGGFSIMQFSLQALYEEFIKAKNWWTNTNCFLPLVRYMGCSFKFYKTEFYDYIVLIERCYPLACTDEMYLSTQPSIMMLTRKCIFVPCKQNSKGKKPYKKVRVRPPSQMTTGWHFSQDLANMPLVVLKTSVCSFDRYYTDSTAKSTTIGFKTLNTQTFRYHDWQEPPTTGYKPQNLLWFYGAENGSPVDPNNTIVSNLIYLGGTGPYEKGTPIKTNISNYFSEPKLWGNIFHDDYTSGTSPVFVTNKSPSEIKTAWNTIKDLTVKASGVFTLRTIPLWLPCRYNPFADKATNNKIWLVSIHSDHTEWKPIDNPLLQRTDLPLWLLVWGWQDWQKKNQQTSQPDINYLTVISSPYISCYPKLDYYVLLDEGFWEGHSTYIESITDSDKKHWYPKNRFQIETLNLIANTGPGTVKLRENQAAEGHMVYRFNFKLGGCPAPMEKICDPSKQSKYPIPNNQQQTTSLQSPENPIQTYLYDFDERRGLLTERATKRIKQDHTSEKTVLPGSSGSAGSSGSAGSSGSALEVLFEGPGSDYKDDDDK

SEQ ID NO: 2600 - protein, 673 aa, synthetic construct
MWGTSNCACAKFQIRRRYARPYRRRHIRRYRRRRRHFRRRRFTTNRKIKRLNIVEWQPKSIRKCRIKGMLCLFQTTEDRLSYNFDMYEESIIPEKLPGGGGFSIKNISLYALYQEHIHAHNIFTHTNTDRPLARYTGCSLKFYQSKDIDYVVTYSTSLPLRSSMGMYNSMQPSIHLMQQNKLIVPSKQTQKRRKPYIKKHISPPTQMKSQWYFQHNIANIPLLMIRTTALTLDNYYIGSRQLSTNVTIHTLNTTYIQNRDWGDRNKTYYCQTLGTQRYFLYGTHSTAQNINDIKLQELIPLTNTQDYVQGFDWTEKDKHNITTYKEFLTKGAGNPFHAEWITAQNPVIHTANSPTQIEQIYTASTTTFQNKKLTDLPTPGYIFITPTVSLRYNPYKDLAERNKCYFVRSKINAHGWDPEQHQELINSDLPQWLLLFGYPDYIKRTQNFALVDTNYILVDHCPYTNPEKTPFIPLSTSFIEGRSPYSPSDTHEPDEEDQNRWYPCYQYQQESINSICLSGPGTPKIPKGITAEAKVKYSFNFKWGGDLPPMSTITNPTDQPTYVVPNNFNETTSLQNPTTRPEHFLYSFDERRGQLTEKATKRLLKDWETKETSLLSTEYRFAEPTQTQAPQEDPSSEEEEESNLFERLLRQRTKQLQLKRRIIQTLKDLQKLE

SEQ ID NO: 2601 - protein, 701 aa, synthetic construct
MGSSHHHHHHGSDYKDDDDKSGSLEVLFQGPSGATMPYYYRRRRYNYRRPRWYGRGWIRRPFRRRFRRKRRVRPTYTTIPLKQWQPPYKRTCYIKGQDCLIYYSNLRLGMNSTMYEKSIVPVHWPGGGSFSVSMLTLDALYDIHKLCRNWWTSTNQDLPLVRYKGCKITFYQSTFTDYIVRIHTELPANSNKLTYPNTHPLMMMMSKYKHIIPSRQTRRKKKPYTKIFVKPPPQFENKWYFATDLYKIPLLQIHCTACNLQNPFVKPDKLSNNVTLWSLNTISIQNRNMSVDQGQSWPFKILGTQSFYFYFYTGANLPGDTTQIPVADLLPLTNPRINRPGQSLNEAKITDHITFTEYKNKFTNYWGNPFNKHIQEHLDMILYSLKSPEAIKNEWTTENMKWNQLNNAGTMALTPFNEPIFTQIQYNPDRDTGEDTQLYLLSNATGTGWDPPGIPELILEGFPLWLIYWGFADFQKNLKKVTNIDTNYMLVAKTKFTQKPGTFYLVILNDTFVEGNSPYEKQPLPEDNIKWYPQVQYQLEAQNKLLQTGPFTPNIQGQLSDNISMFYKFYFKWGGSPPKAINVENPAHQIQYPIPRNEHETTSLQSPGEAPESILYSFDYRHGNYTTTALSRISQDWALKDTVSKITEPDRQQLLKQALECLQISEETQEKKEKEVQQLISNLRQQQQLYRERIISLLKDQ

SEQ ID NO: 2602 - protein, 690 aa, synthetic construct
MGSSHHHHHHGSDYKDDDDKSGSLEVLFQGPSGATMPPYWRQKYYRRRYRPFSWRTRRIIQRRKRWRYRKPRKTYWRRKLRVRKRFYKRKLKKIVLKQFQPKIIRRCTIFGTICLFQGSPERANNNYIQTIYSYVPDKEPGGGGWTLITESLSSLWEDWEHLKNVWTQSNAGLPLVRYGGVTLYFYQSAYTDYIAQVFNCYPMTDTKYTHADSAPNRMLLKKHVIRVPSRETRKKRKPYKRVRVGPPSQMQNKWYFQRDICEIPLIMIAATAVDFRYPFCASDCASNNLTLTCLNPLLFQNQDFDHPSDTQGYFPKPGVYLYSTQRSNKPSSSDCIYLGNTKDNQEGKSASSLMTLKTQKITDWGNPFWHYYIDGSKKIFSYFKPPSQLDSSDFEHMTELAEPMFIQVRYNPERDTGQGNLIYVTENFRGQHWDPPSSDNLKLDGFPLYDMCWGFIDWIEKVHETENLLTNYCFCIRSSAFNEKKTVFIPVDHSFLTGFSPYETPVKSSDQAHWHPQIRFQTKSINDICLTGPGCARSPYGNYMQAKMSYKFHVKWGGCPKTYEKPYDPCSQPNWTIPHNLNETIQIQNPNTCPQTELQEWDWRRDIVTKKAIERIRQHTEPHETLQISTGSKHNPPVHRQTSPWTDSETDSEEEKDQTQEIQIQLNKLRKHQQHLKQQLKQYLKPQNIE

SEQ ID NO: 2603 - protein, 681 aa, synthetic construct
MPPYWRQKYYRRRYRPFSWRTRRIIQRRKRWRYRKPRKTYWRRKLRVRKRRVRPTYTTIPLKQWQPPYKRTCYIKGQDCLIYYSNLRLGMNSTMYEKSIVPVHWPGGGSFSVSMLTLDALYDIHKLCRNWWTSTNQDLPLVRYKGCKITFYQSTFTDYIVRIHTELPANSNKLTYPNTHPLMMMMSKYKHIIPSRQTRRKKKPYTKIFVKPPPQFENKWYFATDLYKIPLLQIHCTACNLQNPFVKPDKLSNNVTLWSLNTISIQNRNMSVDQGQSWPFKILGTQSFYFYFYTGANLPGDTTQIPVADLLPLTNPRINRPGQSLNEAKITDHITFTEYKNKFTNYWGNPFNKHIQEHLDMILYSLKSPEAIKNEWTTENMKWNQLNNAGTMALTPFNEPIFTQIQYNPDRDTGEDTQLYLLSNATGTGWDPPGIPELILEGFPLWLIYWGFADFQKNLKKVTNIDTNYMLVAKTKFTQKPGTFYLVILNDTFVEGNSPYEKQPLPEDNIKWYPQVQYQLEAQNKLLQTGPFTPNIQGQLSDNISMFYKFYFKWGGSPPKAINVENPAHQIQYPIPRNEHETTSLQSPGEAPESILYSFDYRHGNYTTTALSRISQDWALKDTVSKITEPDRQQLLKQALECLQISEETQEKKEKEVQQLISNLRQQQQLYRERIISLLKDQ

SEQ ID NO: 2604 - protein, 681 aa, synthetic construct
MPPYWRQKYYRRRYRPFSWRTRRIIQRRKRWRYRKPRKTYWRRKLRVRKRFYKRKLKKIVLKQFQPKIIRRCTIFGTICLFQGSNLRLGMNSTMYEKSIVPVHWPGGGSFSVSMLTLDALYDIHKLCRNWWTSTNQDLPLVRYKGCKITFYQSTFTDYIVRIHTELPANSNKLTYPNTHPLMMMMSKYKHIIPSRQTRRKKKPYTKIFVKPPPQFENKWYFATDLYKIPLLQIHCTACNLQNPFVKPDKLSNNVTLWSLNTISIQNRNMSVDQGQSWPFKILGTQSFYFYFYTGANLPGDTTQIPVADLLPLTNPRINRPGQSLNEAKITDHITFTEYKNKFTNYWGNPFNKHIQEHLDMILYSLKSPEAIKNEWTTENMKWNQLNNAGTMALTPFNEPIFTQIQYNPDRDTGEDTQLYLLSNATGTGWDPPGIPELILEGFPLWLIYWGFADFQKNLKKVTNIDTNYMLVAKTKFTQKPGTFYLVILNDTFVEGNSPYEKQPLPEDNIKWYPQVQYQLEAQNKLLQTGPFTPNIQGQLSDNISMFYKFYFKWGGSPPKAINVENPAHQIQYPIPRNEHETTSLQSPGEAPESILYSFDYRHGNYTTTALSRISQDWALKDTVSKITEPDRQQLLKQALECLQISEETQEKKEKEVQQLISNLRQQQQLYRERIISLLKDQ

SEQ ID NO: 2605 - protein, 655 aa, synthetic construct
MPPYWRQKYYRRRYRPFSWRTRRIIQRRHRWRYRKPRHTYWRRHLRVRHRFYHRHLHHIVLKQFQPKIIRRCTIFGTICLFQGSPERANNNYIQTIYSYVPDKEPGGGGWTLITESLSSLWEDWEHLKNVWTQSNAGLPLVRYGGVTLYFYQSAYTDYIAQVFNCYPMTDTKYTHADSAPNRMLLKKHVIRVPSRETRKKRKPYKRVRVGPPSQMQNKWYFQRDICEIPLIMIAATAVDFRYPFCASDCASNNLTLTCLNPLLFQNQDFDHPSDTQGYFPKPGVYLYSTQRSNKPSSSDCIYLGNTKDNQEGKSASSLMTLKTQKITDWGNPFWHYYIDGSKKIFSYFKPPSQLDSSDFEHMTELAEPMFIQVRYNPERDTGQGNLIYVTENFRGQHWDPPSSDNLKLDGFPLYDMCWGFIDWIEKVHETENLLTNYCFCIRSSAFNEKKTVFIPVDHSFLTGFSPYETPVKSSDQAHWHPQIRFQTKSINDICLTGPGCARSPYGNYMQAKMSYKFHVKWGGCPKTYEKPYDPCSQPNWTIPHNLNETIQIQNPNTCPQTELQEWDWRRDIVTKKAIERIRQHTEPHETLQISTGSKHNPPVHRQTSPWTDSETDSEEEKDQTQEIQIQLNKLRKHQQHLKQQLKQYLKPQNIE

SEQ ID NO: 2606 - protein, 654 aa, synthetic construct
MWGTSNCACAKFQIRRRYARPYRRRHIRRYRRRRRHFRRRRFTTNRRKRFYKRKLKKIVLKQFQPKIIRRCTIFGTICLFQGSPERANNNYIQTIYSYVPDKEPGGGGWTLITESLSSLWEDWEHLKNVWTQSNAGLPLVRYGGVTLYFYQSAYTDYIAQVFNCYPMTDTKYTHADSAPNRMLLKKHVIRVPSRETRKKRKPYKRVRVGPPSQMQNKWYFQRDICEIPLIMIAATAVDFRYPFCASDCASNNLTLTCLNPLLFQNQDFDHPSDTQGYFPKPGVYLYSTQRSNKPSSSDCIYLGNTKDNQEGKSASSLMTLKTQKITDWGNPFWHYYIDGSKKIFSYFKPPSQLDSSDFEHMTELAEPMFIQVRYNPERDTGQGNLIYVTENFRGQHWDPPSSDNLKLDGFPLYDMCWGFIDWIEKVHETENLLTNYCFCIRSSAFNEKKTVFIPVDHSFLTGFSPYETPVKSSDQAHWHPQIRFQTKSINDICLTGPGCARSPYGNYMQAKMSYKFHVKWGGCPKTYEKPYDPCSQPNWTIPHNLNETIQIQNPNTCPQTELQEWDWRRDIVTKKAIERIRQHTEPHETLQISTGSKHNPPVHRQTSPWTDSETDSEEEKDQTQEIQIQLNKLRKHQQHLKQQLKQYLKPQNIE

SEQ ID NO: 2607 - protein, 655 aa, synthetic construct
MPPYWRQKYYRRRYRPFSWRTRRIIQRRKRWRYRKPRKTYWRRKLRVRKRFYKRKLKKIVLKQFQPKIIRRCTIFGTICLFQGSPERANNNYIQTIYSYVPDKEPGGGGWTLITESLSSLWEDWEHLKNVWTQSNAGLPLVRYGGVTLYFYQSAYTDYIAQVFNCYPMTDTKYTHADSAPNRMLLKKHAKKWFSRETRKKRKPGFKRLLGPPSQMQNKWYFQRDICEIPLIMIAATAVDFRYPFCASDCASNNLTLTCLNPLLFQNQDFDHPSDTQGYFPKPGVYLYSTQRSNKPSSSDCIYLGNTKDNQEGKSASSLMTLKTQKITDWGNPFWHYYIDGSKKIFSYFKPPSQLDSSDFEHMTELAEPMFIQVRYNPERDTGQGNLIYVTENFRGQHWDPPSSDNLKLDGFPLYDMCWGFIDWIEKVHETENLLTNYCFCIRSSAFNEKKTVFIPVDHSFLTGFSPYETPVKSSDQAHWHPQIRFQTKSINDICLTGPGCARSPYGNYMQAKMSYKFHVKWGGCPKTYEKPYDPCSQPNWTIPHNLNETIQIQNPNTCPQTELQEWDWRRDIVTKKAIERIRQHTEPHETLQISTGSKHNPPVHRQTSPWTDSETDSEEEKDQTQEIQIQLNKLRKHQQHLKQQLKQYLKPQNIE

SEQ ID NO: 2608 - protein, 666 aa, synthetic construct
MPYYYRRRRYNYRRPRWYGRGWIRRPFRRRFRRKRRVRPTYTTIPLKQWQPPYKRRCTIFGTICLFQGSNLRLGMNSTMYEKSIVPVHWPGGGSFSVSMLTLDALYDIHKLCRNWWTSTNQDLPLVRYKGCKITFYQSTFTDYIVRIHTELPANSNKLTYPNTHPLMMMMSKYKHIIPSRQTRRKKKPYTKIFVKPPPQFENKWYFATDLYKIPLLQIHCTACNLQNPFVKPDKLSNNVTLWSLNTISIQNRNMSVDQGQSWPFKILGTQSFYFYFYTGANLPGDTTQIPVADLLPLTNPRINRPGQSLNEAKITDHITFTEYKNKFTNYWGNPFNKHIQEHLDMILYSLKSPEAIKNEWTTENMKWNQLNNAGTMALTPFNEPIFTQIQYNPDRDTGEDTQLYLLSNATGTGWDPPGIPELILEGFPLWLIYWGFADFQKNLKKVTNIDTNYMLVAKTKFTQKPGTFYLVILNDTFVEGNSPYEKQPLPEDNIKWYPQVQYQLEAQNKLLQTGPFTPNIQGQLSDNISMFYKFYFKWGGSPPKAINVENPAHQIQYPIPRNEHETTSLQSPGEAPESILYSFDYRHGNYTTTALSRISQDWALKDTVSKITEPDRQQLLKQALECLQISEETQEKKEKEVQQLISNLRQQQQLYRERIISLLKDQ

SEQ ID NO: 2609 - protein, 666 aa, synthetic construct
MPYYYRRRRYNYRRPRWYGRGWIRRPFRRRFRRKRRVRPTYTTIPLKQWQPPYKRTCYIKGQDCLIYYSPERANNNYIQTIYSYVPDKEPGGGGWTLITESLSSLWEDWEHLKNVWTQSNAGLPLVRYKGCKITFYQSTFTDYIVRIHTELPANSNKLTYPNTHPLMMMMSKYKHIIPSRQTRRKKKPYTKIFVKPPPQFENKWYFATDLYKIPLLQIHCTACNLQNPFVKPDKLSNNVTLWSLNTISIQNRNMSVDQGQSWPFKILGTQSFYFYFYTGANLPGDTTQIPVADLLPLTNPRINRPGQSLNEAKITDHITFTEYKNKFTNYWGNPFNKHIQEHLDMILYSLKSPEAIKNEWTTENMKWNQLNNAGTMALTPFNEPIFTQIQYNPDRDTGEDTQLYLLSNATGTGWDPPGIPELILEGFPLWLIYWGFADFQKNLKKVTNIDTNYMLVAKTKFTQKPGTFYLVILNDTFVEGNSPYEKQPLPEDNIKWYPQVQYQLEAQNKLLQTGPFTPNIQGQLSDNISMFYKFYFKWGGSPPKAINVENPAHQIQYPIPRNEHETTSLQSPGEAPESILYSFDYRHGNYTTTALSRISQDWALKDTVSKITEPDRQQLLKQALECLQISEETQEKKEKEVQQLISNLRQQQQLYRERIISLLKDQ

SEQ ID NO: 2610 - protein, 666 aa, synthetic construct
MPYYYRRRRYNYRRPRWYGRGWIRRPFRRRFRRKRRVRPTYTTIPLKQWQPPYKRTCYIKGQDCLIYYSNLRLGMNSTMYEKSIVPVHWPGGGSFSVSMLTLDALYDIHKLCRNWWTSTNQDLPLVRYGGVTLYFYQSTFTDYIVRIHTELPANSNKLTYPNTHPLMMMMSKYKHIIPSRQTRRKKKPYTKIFVKPPPQFENKWYFATDLYKIPLLQIHCTACNLQNPFVKPDKLSNNVTLWSLNTISIQNRNMSVDQGQSWPFKILGTQSFYFYFYTGANLPGDTTQIPVADLLPLTNPRINRPGQSLNEAKITDHITFTEYKNKFTNYWGNPFNKHIQEHLDMILYSLKSPEAIKNEWTTENMKWNQLNNAGTMALTPFNEPIFTQIQYNPDRDTGEDTQLYLLSNATGTGWDPPGIPELILEGFPLWLIYWGFADFQKNLKKVTNIDTNYMLVAKTKFTQKPGTFYLVILNDTFVEGNSPYEKQPLPEDNIKWYPQVQYQLEAQNKLLQTGPFTPNIQGQLSDNISMFYKFYFKWGGSPPKAINVENPAHQIQYPIPRNEHETTSLQSPGEAPESILYSFDYRHGNYTTTALSRISQDWALKDTVSKITEPDRQQLLKQALECLQISEETQEKKEKEVQQLISNLRQQQQLYRERIISLLKDQ

SEQ ID NO: 2611 - protein, 666 aa, synthetic construct
MPYYYRRRRYNYRRPRWYGRGWIRRPFRRRFRRKRRVRPTYTTIPLKQWQPPYKRTCYIKGQDCLIYYSNLRLGMNSTMYEKSIVPVHWPGGGSFSVSMLTLDALYDIHKLCRNWWTSTNQDLPLVRYKGCKITFYQSTFTDYIVRIHNCYPMTDTKYTHADSAPNRMLLKKHKHIIPSRQTRRKKKPYTKIFVKPPPQFENKWYFATDLYKIPLLQIHCTACNLQNPFVKPDKLSNNVTLWSLNTISIQNRNMSVDQGQSWPFKILGTQSFYFYFYTGANLPGDTTQIPVADLLPLTNPRINRPGQSLNEAKITDHITFTEYKNKFTNYWGNPFNKHIQEHLDMILYSLKSPEAIKNEWTTENMKWNQLNNAGTMALTPFNEPIFTQIQYNPDRDTGEDTQLYLLSNATGTGWDPPGIPELILEGFPLWLIYWGFADFQKNLKKVTNIDTNYMLVAKTKFTQKPGTFYLVILNDTFVEGNSPYEKQPLPEDNIKWYPQVQYQLEAQNKLLQTGPFTPNIQGQLSDNISMFYKFYFKWGGSPPKAINVENPAHQIQYPIPRNEHETTSLQSPGEAPESILYSFDYRHGNYTTTALSRISQDWALKDTVSKITEPDRQQLLKQALECLQISEETQEKKEKEVQQLISNLRQQQQLYRERIISLLKDQ

SEQ ID NO: 2612 - protein, 666 aa, synthetic construct
MPYYYRRRRYNYRRPRWYGRGWIRRPFRRRFRRKRRVRPTYTTIPLKQWQPPYKRTCYIKGQDCLIYYSNLRLGMNSTMYEKSIVPVHWPGGGSFSVSMLTLDALYDIHKLCRNWWTSTNQDLPLVRYKGCKITFYQSTFTDYIVRIHTELPANSNKLTYPNTHPLMMMMSKHVIRVPSRQTRRKKKPYTKIFVKPPPQFENKWYFATDLYKIPLLQIHCTACNLQNPFVKPDKLSNNVTLWSLNTISIQNRNMSVDQGQSWPFKILGTQSFYFYFYTGANLPGDTTQIPVADLLPLTNPRINRPGQSLNEAKITDHITFTEYKNKFTNYWGNPFNKHIQEHLDMILYSLKSPEAIKNEWTTENMKWNQLNNAGTMALTPFNEPIFTQIQYNPDRDTGEDTQLYLLSNATGTGWDPPGIPELILEGFPLWLIYWGFADFQKNLKKVTNIDTNYMLVAKTKFTQKPGTFYLVILNDTFVEGNSPYEKQPLPEDNIKWYPQVQYQLEAQNKLLQTGPFTPNIQGQLSDNISMFYKFYFKWGGSPPKAINVENPAHQIQYPIPRNEHETTSLQSPGEAPESILYSFDYRHGNYTTTALSRISQDWALKDTVSKITEPDRQQLLKQALECLQISEETQEKKEKEVQQLISNLRQQQQLYRERIISLLKDQ

SEQ ID NO: 2613 - protein, 640 aa, synthetic construct
MPYYYRRRRYNYRRPRWYGRGWIRRPFRRRFRRKRRVRPTYTTIPLKQWQPPYKRTCYIKGQDCLIYYSNLRLGMNSTMYEKSIVPVHWPGGGSFSVSMLTLDALYDIHKLCRNWWTSTNQDLPLVRYKGCKITFYQSTFTDYIVRIHTELPANSNKLTYPNTHPLMMMMSKYKHIIPSRQTRRKKKPYTKIFVKPPPQFENKWYFATDLYKIPLIMIAATAVDFRYPFCASDCASNNLTLTCLNPLLFQNQDFDHPSDTQGYFPKPGVYLYSTQRSNKPSSSDCIYLGNTKDNQEGKSASSLMTLKTQKITDWGNPFWHYYIDGSKKIFSYFKPPSQLDSSDFEHMTELAEPMFIQVRYNPERDTGQGNLIYVTENFRGQHWDPPSSDNLKLDGFPLYDMCWGFIDWIEKVHETENLLTNYCFCIRSSAFNEKKTVFIPVDHSFLTGFSPYETPVKSSDQAHWHPQIRFQTKSINDICLTGPGCARSPYGNYMQAKMSYKFHVKWGGCPKTYEKPYDPCSQPNWTIPHNLNETIQIQNPNTCPQTELQEWDWRRDIVTKKAIERIRQHTEPHETLQISTGSKHNPPVHRQTSPWTDSETDSEEEKDQTQEIQIQLNKLRKHQQHLKQQLKQYLKPQNIE

SEQ ID NO: 2614 - protein, 494 aa, synthetic construct
MAVAPAPDTAPVPDVDSRGAILRRQYNLSTSPLTSTIATGTNLVLYAAPLSSLLPLQDGTNTHIMATEASNYAQYRVVRATIRYRPLVPSAVGGYAISISFWPQTTTTPTSVDMNSITSTDVRILVQPGIASELVIPSERLHYRNQGWRSVETSGVAEEEATSGLVMLCIHGSPVNSYTNTPYTGALGLLDFALELEFRNLTPGNTNTRVSRYSSSARHKLRRGPDGTAELTTTAATRFMKDLHFTGTNDVGEVGRGIALTLFNLADTLLGGLPTELISSAGGQLFYSRPVVSANGEPTVKLYTSVENAQQDKGIAIPHDIDLGESRVVIQDYDNQHEQDRPTPSPAPSRPLNTTYIQNRDWGDRNKTYYCQTLGTQRYFLYGTHSTAQNINDIKLQELIPLTNTQDYVQGFDWTEKDKHNITTYKEFLTKGAGNPFHAEWITAQNPVIHTANSPTQIEQIYTASTTTFQNKKLTDLPTPGYIFITPTVHHHHH

SEQ ID NO: 2615 - protein, 11 aa, unidentified
  VARIANT 4: note = Any amino acid
  VARIANT 5: note = Any amino acid
  VARIANT 7: note = Any amino acid
  VARIANT 9: note = Any amino acid
  VARIANT 10: note = Any amino acid
YNPXXDXGXXN

SEQ ID NO: 2616 - skipped

SEQ ID NO: 2617 - protein, 46 aa, synthetic construct
MWGTSNCACAKFQIRRRYARPYRRRHIRRYRRRRRHFRRRRFTTNR

SEQ ID NO: 2618 - DNA, 5452 bp, synthetic construct
  source 1..5452: mol_type = other DNA
tcgcgcgtttcggtgatgacggtgaaaacctctgacacatgcagctcccggagacggtcacagcttgtctgtaagcggatgccgggagcagacaagcccgtcagggcgcgtcagcgggtgttggcgggtgtcggggctggcttaactatgcggcatcagagcagattgtactgagagtgcaccatatgcggtgtgaaataccgcacagatgcgtaaggagaaaataccgcatcaggcgccattcgccattcaggctgcgcaactgttgggaagggcgatcggtgcgggcctcttcgctattacgccagctggcgaaagggggatgtgctgcaaggcgattaagttgggtaacgccagggttttcccagtcacgacgttgtaaaacgacggccagagaattcgagctcggtacctcgcgaatacatctagattaccgttcgtatagcatacattatacgaagttattaaactacgcctgcaaactttcactctcggtgtccatttatataagataaaacttaaataaacatccaccactctcccaaatacgcaggcgcacaagggggctccgcccccttaaacccccaagggggctccgcccccttaaacccccaagggggctccgcccccttacaccccctaataaatattcaacaggaaaaccacctaattagaattgccgaccacaaaccgtcacttacttctcctttttgcacttacttcctcttttacttattattattcattacattaattaataatcactgtaattccggggaggagctaacaatctatataactaactacacttccgaatggctgagtttatgccgccagacggagacgggatcacttcagtgactccaggctgaacttgggcgggagccgaaggtgagtgcaaccaccgtagtctaggggcaattcgggctagttcagtatggcggaacgggcaagaaacttaaatattattattttacagatgggcgttgacattgattattgactagttattaatagtaatcaattacggggtcattagttcatagcccatatatggagttccgcgttacataacttacggtaaatggcccgcctggctgaccgcccaacgacccccgcccattgacgtcaataatgacgtatgttcccatagtaacgccaatagggactttccattgacgtcaatgggtggagtatttacggtaaactgcccacttggcagtacatcaagtgtatcatatgccaagtacgccccctattgacgtcaatgacggtaaatggcccgcctggcattatgcccagtacatgaccttatgggactttcctacttggcagtacatctacgtattagtcatcgctattaccatggtgatgcggttttggcagtacatcaatgggcgtggatagcggtttgactcacggggatttccaagtctccaccccattgacgtcaatgggagtttgttttggcaccaaaatcaacgggactttccaaaatgtcgtaacaactccgccccattgacgcaaatgggcggtaggcgtgtacggtgggaggtctatataagcagagctctctggctaactggatctacaaaaaagcagatccaccggtcgccaccatggtgagcaagggcgaggagctgttcaccggggtggtgcccatcctggtcgagctggacggcgacgtaaacggccacaagttcagcgtgtccggcgagggcgagggcgatgccacctacggcaagctgaccctgaagttcatctgcaccaccggcaagctgcccgtgccctggcccaccctcgtgaccaccctgacctacggcgtgcagtgcttcagccgctaccccgaccacatgaagcagcacgacttcttcaagtccgccatgcccgaaggctacgtccaggagcgcaccatcttcttcaaggacgacggcaactacaagacccgcgccgaggtgaagttcgagggcgacaccctggtgaaccgcatcgagctgaagggcatcgacttcaaggaggacggcaacatcctggggcacaagctggagtacaactacaacagccacaacgtctatatcatggccgacaagcagaagaacggcatcaaggtgaacttcaagatccgccacaacatcgaggacggcagcgtgcagctcgccgaccactaccagcagaacacccccatcggcgacggccccgtgctgctgcccgacaaccactacctgagcacccagtccgccctgagcaaagaccccaacgagaagcgcgatcacatggtcctgctggagttcgtgaccgccgccgggatcactctcggcatggacgagctgtacaagtaataaaatcaacctctggattacaaaatttgtgaaagattgactggtattcttaactatgttgctccttttacgctatgtggatacgctgctttaatgcctttgtatcatgctattgcttcccgtatggctttcattttctcctccttgtataaatcctggttgctgtctctttatgaggagttgtggcccgttgtcaggcaacgtggcgtggtgtgcactgtgtttgctgacgcaacccccactggttggggcattgccaccacctgtcagctcctttccgggactttcgctttccccctccctattgccacggcggaactcatcgccgcctgccttgcccgctgctggacaggggctcggctgttgggcactgacaattccgtggtgttgtcggggaagctgacgtcctttccatggctgctcgcctgtgttgccacctggattctgcgcgggacgtccttctgctacgtcccttcggccctcaatccagcggaccttccttcccgcggcctgctgccggctctgcggcctcttccgcgtcttcgccttcgccctcagacgagtcggatctccctttgggccgcctccccgcctggttccgactgtgccttctagttgccagccatctgttgtttgcccctcccccgtgccttccttgaccctggaaggtgccactcccactgtcctttcctaataaaatgaggaaattgcatcgcattgtctgagtaggtgtcattctattctggggggtggggtggggcaggacagcaagggggaggattgggtagacaatagcaggcatgctggggatgcggtgggctctatggtcgagttagtttgctccagtaaagttgtttataataactactaaatccgcatgttacggaatttcttattaatttttttttcgtaaggaacaacggatcttgaaataacttcgtatagcatacattatacgaacggtaatcggatcccgggcccgtcgactgcagaggcctgcatgcaagcttggtgtaatcatggtcatagctgtttcctgtgtgaaattgttatccgctcacaattccacacaacatacgagccggaagcataaagtgtaaagcctggggtgcctaatgagtgagctaactcacattaattgcgttgcgctcactgcccgctttccagtcgggaaacctgtcgtgccagctgcattaatgaatcggccaacgcgcggggagaggcggtttgcgtattgggcgctcttccgcttcctcgctcactgactcgctgcgctcggtcgttcggctgcggcgagcggtatcagctcactcaaaggcggtaatacggttatccacagaatcaggggataacgcaggaaagaacatgtgagcaaaaggccagcaaaaggccaggaaccgtaaaaaggccgcgttgctggcgtttttccataggctccgcccccctgacgagcatcacaaaaatcgacgctcaagtcagaggtggcgaaacccgacaggactataaagataccaggcgtttccccctggaagctccctcgtgcgctctcctgttccgaccctgccgcttaccggatacctgtccgcctttctcccttcgggaagcgtggcgctttctcatagctcacgctgtaggtatctcagttcggtgtaggtcgttcgctccaagctgggctgtgtgcacgaaccccccgttcagcccgaccgctgcgccttatccggtaactatcgtcttgagtccaacccggtaagacacgacttatcgccactggcagcagccactggtaacaggattagcagagcgaggtatgtaggcggtgctacagagttcttgaagtggtggcctaactacggctacactagaagaacagtatttggtatctgcgctctgctgaagccagttaccttcggaaaaagagttggtagctcttgatccggcaaacaaaccaccgctggtagcggtggtttttttgtttgcaagcagcagattacgcgcagaaaaaaaggatctcaagaagatcctttgatcttttctacggggtctgacgctcagtggaacgaaaactcacgttaagggattttggtcatgagattatcaaaaaggatcttcacctagatccttttaaattaaaaatgaagttttaaatcaagcccaatctgaataatgttacaaccaattaaccaattctgattagaaaaactcatcgagcatcaaatgaaactgcaatttattcatatcaggattatcaataccatatttttgaaaaagccgtttctgtaatgaaggagaaaactcaccgaggcagttccataggatggcaagatcctggtatcggtctgcgattccgactcgtccaacatcaatacaacctattaatttcccctcgtcaaaaataaggttatcaagtgagaaatcaccatgagtgacgactgaatccggtgagaatggcaaaagtttatgcatttctttccagacttgttcaacaggccagccattacgctcgtcatcaaaatcactcgcatcaaccaaaccgttattcattcgtgattgcgcctgagcgagacgaaatacgcgatcgctgttaaaaggacaattacaaacaggaatcgaatgcaaccggcgcaggaacactgccagcgcatcaacaatattttcacctgaatcaggatattcttctaatacctggaatgctgtttttccggggatcgcagtggtgagtaaccatgcatcatcaggagtacggataaaatgcttgatggtcggaagaggcataaattccgtcagccagtttagtctgaccatctcatctgtaacatcattggcaacgctacctttgccatgtttcagaaacaactctggcgcatcgggcttcccatacaagcgatagattgtcgcacctgattgcccgacattatcgcgagcccatttatacccatataaatcagcatccatgttggaatttaatcgcggcctcgacgtttcccgttgaatatggctcataacaccccttgtattactgtttatgtaagcagacagttttattgttcatgatgatatatttttatcttgtgcaatgtaacatcagagattttgagacacgggccagagctgca

SEQ ID NO: 2619 - DNA, 2839 bp, synthetic construct
  source 1..2839: mol_type = other DNA
ctagttattaatagtaatcaattacggggtcattagttcatagcccatatatggagttccgcgttacataacttacggtaaatggcccgcctggctgaccgcccaacgacccccgcccattgacgtcaataatgacgtatgttcccatagtaacgccaatagggactttccattgacgtcaatgggtggagtatttacggtaaactgcccacttggcagtacatcaagtgtatcatatgccaagtacgccccctattgacgtcaatgacggtaaatggcccgcctggcattatgcccagtacatgaccttatgggactttcctacttggcagtacatctacgtattagtcatcgctattaccatggtgatgcggttttggcagtacatcaatgggcgtggatagcggtttgactcacggggatttccaagtctccaccccattgacgtcaatgggagtttgttttggcaccaaaatcaacgggactttccaaaatgtcgtaacaactccgccccattgacgcaaatgggcggtaggcgtgtacggtgggaggtctatataagcagagctctctggctaactggatctacaaaaaagcagatccaccggtcgccaccatggtgagcaagggcgaggagctgttcaccggggtggtgcccatcctggtcgagctggacggcgacgtaaacggccacaagttcagcgtgtccggcgagggcgagggcgatgccacctacggcaagctgaccctgaagttcatctgcaccaccggcaagctgcccgtgccctggcccaccctcgtgaccaccctgacctacggcgtgcagtgcttcagccgctaccccgaccacatgaagcagcacgacttcttcaagtccgccatgcccgaaggctacgtccaggagcgcaccatcttcttcaaggacgacggcaactacaagacccgcgccgaggtgaagttcgagggcgacaccctggtgaaccgcatcgagctgaagggcatcgacttcaaggaggacggcaacatcctggggcacaagctggagtacaactacaacagccacaacgtctatatcatggccgacaagcagaagaacggcatcaaggtgaacttcaagatccgccacaacatcgaggacggcagcgtgcagctcgccgaccactaccagcagaacacccccatcggcgacggccccgtgctgctgcccgacaaccactacctgagcacccagtccgccctgagcaaagaccccaacgagaagcgcgatcacatggtcctgctggagttcgtgaccgccgccgggatcactctcggcatggacgagctgtacaagtaataaaatcaacctctggattacaaaatttgtgaaagattgactggtattcttaactatgttgctccttttacgctatgtggatacgctgctttaatgcctttgtatcatgctattgcttcccgtatggctttcattttctcctccttgtataaatcctggttgctgtctctttatgaggagttgtggcccgttgtcaggcaacgtggcgtggtgtgcactgtgtttgctgacgcaacccccactggttggggcattgccaccacctgtcagctcctttccgggactttcgctttccccctccctattgccacggcggaactcatcgccgcctgccttgcccgctgctggacaggggctcggctgttgggcactgacaattccgtggtgttgtcggggaagctgacgtcctttccatggctgctcgcctgtgttgccacctggattctgcgcgggacgtccttctgctacgtcccttcggccctcaatccagcggaccttccttcccgcggcctgctgccggctctgcggcctcttccgcgtcttcgccttcgccctcagacgagtcggatctccctttgggccgcctccccgcctggttccgactgtgccttctagttgccagccatctgttgtttgcccctcccccgtgccttccttgaccctggaaggtgccactcccactgtcctttcctaataaaatgaggaaattgcatcgcattgtctgagtaggtgtcattctattctggggggtggggtggggcaggacagcaagggggaggattgggtagacaatagcaggcatgctggggatgcggtgggctctatggtcgagttagtttgctccagtaaagttgtttataataactactaaatccgcatgttacggaatttcttattaatttttttttcgtaaggaacaacggatcttgaaataacttcgtatagcatacattatacgaagttattaaactacgcctgcaaactttcactctcggtgtccatttatataagataaaacttaaataaacatccaccactctcccaaatacgcaggcgcacaagggggctccgcccccttaaacccccaagggggctccgcccccttaaacccccaagggggctccgcccccttacaccccctaataaatattcaacaggaaaaccacctaattagaattgccgaccacaaaccgtcacttacttctcctttttgcacttacttcctcttttacttattattattcattacattaattaataatcactgtaattccggggaggagctaacaatctatataactaactacacttccgaatggctgagtttatgccgccagacggagacgggatcacttcagtgactccaggctgaacttgggcgggagccgaaggtgagtgcaaccaccgtagtctaggggcaattcgggctagttcagtatggcggaacgggcaagaaacttaaatattattattttacagatgggcgttgacattgattattga

SEQ ID NO: 2620 - DNA, 5980 bp, synthetic construct
  source 1..5980: mol_type = other DNA
caattgctttccagtcgggaaacctgtcgtgccagctgcattaatgaatcggccaacgcgcggggagaggcggtttgcgtattgggcgctcttccgcttcctcgctcactgactcgctgcgctcggtcgttcggctgcggcgagcggtatcagctcactcaaaggcggtaatacggttatccacagaatcaggggataacgcaggaaagaacatgtgagcaaaaggccagcaaaaggccaggaaccgtaaaaaggccgcgttgctggcgtttttccataggctccgcccccctgacgagcatcacaaaaatcgacgctcaagtcagaggtggcgaaacccgacaggactataaagataccaggcgtttccccctggaagctccctcgtgcgctctcctgttccgaccctgccgcttaccggatacctgtccgcctttctcccttcgggaagcgtggcgctttctcatagctcacgctgtaggtatctcagttcggtgtaggtcgttcgctccaagctgggctgtgtgcacgaaccccccgttcagcccgaccgctgcgccttatccggtaactatcgtcttgagtccaacccggtaagacacgacttatcgccactggcagcagccactggtaacaggattagcagagcgaggtatgtaggcggtgctacagagttcttgaagtggtggcctaactacggctacactagaaggacagtatttggtatctgcgctctgctgaagccagttaccttcggaaaaagagttggtagctcttgatccggcaaacaaaccaccgctggtagcggtggtttttttgtttgcaagcagcagattacgcgcagaaaaaaaggatctcaagaagatcctttgatcttttctacggggtctgacgctcagtggaacgaaaactcacgttaagggattttggtcatgagattatcaaaaaggatcttcacctagatccttttaaattaaaaatgaagttttaaatcaatctaaagtatatatgagtaaacttggtctgacagttagaaaaactcatcgagcatcaaatgaaactgcaatttattcatatcaggattatcaataccatatttttgaaaaagccgtttctgtaatgaaggagaaaactcaccgaggcagttccataggatggcaagatcctggtatcggtctgcgattccgactcgtccaacatcaatacaacctattaatttcccctcgtcaaaaataaggttatcaagtgagaaatcaccatgagtgacgactgaatccggtgagaatggcaaaagtttatgcatttctttccagacttgttcaacaggccagccattacgctcgtcatcaaaatcactcgcatcaaccaaaccgttattcattcgtgattgcgcctgagcgagacgaaatacgcgatcgctgttaaaaggacaattacaaacaggaatcgaatgcaaccggcgcaggaacactgccagcgcatcaacaatattttcacctgaatcaggatattcttctaatacctggaatgctgtttttccggggatcgcagtggtgagtaaccatgcatcatcaggagtacggataaaatgcttgatggtcggaagaggcataaattccgtcagccagtttagtctgaccatctcatctgtaacatcattggcaacgctacctttgccatgtttcagaaacaactctggcgcatcgggcttcccatacaagcgatagattgtcgcacctgattgcccgacattatcgcgagcccatttatacccatataaatcagcatccatgttggaatttaatcgcggcctcgacgtttcccgttgaatatggctcataacaccccttgtattactgtttatgtaagcagacagttttattgttcatgatgatatatttttatcttgtgcaatgtaacatcagagattttgagacacgggccagagctgcacacatttccccgaaaagtgccacctgacgtctaagaaaccattattatcatgacattaacctataaaaataggcgtatcacgaggccgcccctgcagccgaattatattatttttgccaaataatttttaacaaaagctctgaagtcttcttcatttaaattcttagatgatacttcatctggaaaattgtcccaattagtagcatcacgctgtgagtaagttctaaaccatttttttattgttgtattatctctaatcttactactcgatgagttttcggtattatctctatttttaacttggagcaggttccattcattgtttttttcatcatagtgaataaaatcaactgctttaacacttgtgcctgaacaccatatccatccggcgtaatacgactcactatagggagagcggccgccagatcttccggatggctcgagtttttcagcaagattaccgttcgtatagcatacattatacgaagttataggccagcattaattcacttaaggagtctgtttatttaagttaaaccttaataaacggtcaccgcctccctaatacgcaggcgcagaaagggggctccgccccctttaacccccagggggctccgccccctgaaacccccaagggggctacgcccccttacaccccctaataaatattcaacaggaaaaccacctaatttaaattgccgaccacaaaccgtcacttagttcccctttttgcaacaacttctgcttttttccaactgccggaaaaccacataatttgcatggctaaccacaaactgatatgctaattaacttccacaaaacaacttccccttttaaaaccacacctacaaattaattattaaacacagtcacatcctgggaggtactaccacactataataccaagtgcacttccgaatggctgagtttatgccgctagacggagaacgcatcagttactgactgcggactgaacttgggcgggtgccgaaggtgagtgaaaccaccgaagtcaaggggcaattcgggctagttcagtctagcggaacgggcaagaaacttaaaattattttatttttcagatgggcgttgacattgattattgactagttattaatagtaatcaattacggggtcattagttcatagcccatatatggagttccgcgttacataacttacggtaaatggcccgcctggctgaccgcccaacgacccccgcccattgacgtcaataatgacgtatgttcccatagtaacgccaatagggactttccattgacgtcaatgggtggagtatttacggtaaactgcccacttggcagtacatcaagtgtatcatatgccaagtacgccccctattgacgtcaatgacggtaaatggcccgcctggcattatgcccagtacatgaccttatgggactttcctacttggcagtacatctacgtattagtcatcgctattaccatggtgatgcggttttggcagtacatcaatgggcgtggatagcggtttgactcacggggatttccaagtctccaccccattgacgtcaatgggagtttgttttggcaccaaaatcaacgggactttccaaaatgtcgtaacaactccgccccattgacgcaaatgggcggtaggcgtgtacggtgggaggtctatataagcagagctctctggctaactggatctacaaaaaagcagatccaccggtcgccaccatggtgagcaagggcgaggagctgttcaccggggtggtgcccatcctggtcgagctggacggcgacgtaaacggccacaagttcagcgtgtccggcgagggcgagggcgatgccacctacggcaagctgaccctgaagttcatctgcaccaccggcaagctgcccgtgccctggcccaccctcgtgaccaccctgacctacggcgtgcagtgcttcagccgctaccccgaccacatgaagcagcacgacttcttcaagtccgccatgcccgaaggctacgtccaggagcgcaccatcttcttcaaggacgacggcaactacaagacccgcgccgaggtgaagttcgagggcgacaccctggtgaaccgcatcgagctgaagggcatcgacttcaaggaggacggcaacatcctggggcacaagctggagtacaactacaacagccacaacgtctatatcatggccgacaagcagaagaacggcatcaaggtgaacttcaagatccgccacaacatcgaggacggcagcgtgcagctcgccgaccactaccagcagaacacccccatcggcgacggccccgtgctgctgcccgacaaccactacctgagcacccagtccgccctgagcaaagaccccaacgagaagcgcgatcacatggtcctgctggagttcgtgaccgccgccgggatcactctcggcatggacgagctgtacaagtaataaaatcaacctctggattacaaaatttgtgaaagattgactggtattcttaactatgttgctccttttacgctatgtggatacgctgctttaatgcctttgtatcatgctattgcttcccgtatggctttcattttctcctccttgtataaatcctggttgctgtctctttatgaggagttgtggcccgttgtcaggcaacgtggcgtggtgtgcactgtgtttgctgacgcaacccccactggttggggcattgccaccacctgtcagctcctttccgggactttcgctttccccctccctattgccacggcggaactcatcgccgcctgccttgcccgctgctggacaggggctcggctgttgggcactgacaattccgtggtgttgtcggggaagctgacgtcctttccatggctgctcgcctgtgttgccacctggattctgcgcgggacgtccttctgctacgtcccttcggccctcaatccagcggaccttccttcccgcggcctgctgccggctctgcggcctcttccgcgtcttcgccttcgccctcagacgagtcggatctccctttgggccgcctccccgcctggttccgactgtgccttctagttgccagccatctgttgtttgcccctcccccgtgccttccttgaccctggaaggtgccactcccactgtcctttcctaataaaatgaggaaattgcatcgcattgtctgagtaggtgtcattctattctggggggtggggtggggcaggacagcaagggggaggattgggtagacaatagcaggcatgctggggatgcggtgggctctatggtcgagttagtttgctccagtaaagttgtttataataactactaaatccgcatgttacggaatttcttattaatttttttttcgtaaggaacaacggatcttaatgaatggccgcaaatggtatggaagctaatagcgcgggtgagagggtaattagccatgttcaccaatataacgctatcaggcaattctataagattctgaaataacttcgtatagcatacattatacgaacggtaatctttctagaagatctcctacaatattctcagctgccatggaaaatcgatgttcttcttttattctctcaagattttcaggctgtatattaaaacttatattaagaactatgctaaccacctcatcaggaaccgttgtaggtggcgtgggttttcttggcaatcgactctcatgaaaactacgagctaaatattcaatatgttcctcttgaccaactttattctgcattttttttgaacgaggtttagagcaagcttcaggaaactgagacaggaattttattaaaaatttaaattttgaagaaagttcagggttaatagcatccattttttgctttgcaagttcctcagcattcttaacaaaagacgtctcttttgacatgtttaaagtttaaacctcctgtgtgaaattattatccgctcataattccacacattatacgagccggaagcataaagtgtaaagcctggggtgcctaatgagtgagctaactcacattaattgcgttgcgctcactgc

SEQ ID NO: 2621 - DNA, 3015 bp, synthetic construct
  source 1..3015: mol_type = other DNA
ctagttattaatagtaatcaattacggggtcattagttcatagcccatatatggagttccgcgttacataacttacggtaaatggcccgcctggctgaccgcccaacgacccccgcccattgacgtcaataatgacgtatgttcccatagtaacgccaatagggactttccattgacgtcaatgggtggagtatttacggtaaactgcccacttggcagtacatcaagtgtatcatatgccaagtacgccccctattgacgtcaatgacggtaaatggcccgcctggcattatgcccagtacatgaccttatgggactttcctacttggcagtacatctacgtattagtcatcgctattaccatggtgatgcggttttggcagtacatcaatgggcgtggatagcggtttgactcacggggatttccaagtctccaccccattgacgtcaatgggagtttgttttggcaccaaaatcaacgggactttccaaaatgtcgtaacaactccgccccattgacgcaaatgggcggtaggcgtgtacggtgggaggtctatataagcagagctctctggctaactggatctacaaaaaagcagatccaccggtcgccaccatggtgagcaagggcgaggagctgttcaccggggtggtgcccatcctggtcgagctggacggcgacgtaaacggccacaagttcagcgtgtccggcgagggcgagggcgatgccacctacggcaagctgaccctgaagttcatctgcaccaccggcaagctgcccgtgccctggcccaccctcgtgaccaccctgacctacggcgtgcagtgcttcagccgctaccccgaccacatgaagcagcacgacttcttcaagtccgccatgcccgaaggctacgtccaggagcgcaccatcttcttcaaggacgacggcaactacaagacccgcgccgaggtgaagttcgagggcgacaccctggtgaaccgcatcgagctgaagggcatcgacttcaaggaggacggcaacatcctggggcacaagctggagtacaactacaacagccacaacgtctatatcatggccgacaagcagaagaacggcatcaaggtgaacttcaagatccgccacaacatcgaggacggcagcgtgcagctcgccgaccactaccagcagaacacccccatcggcgacggccccgtgctgctgcccgacaaccactacctgagcacccagtccgccctgagcaaagaccccaacgagaagcgcgatcacatggtcctgctggagttcgtgaccgccgccgggatcactctcggcatggacgagctgtacaagtaataaaatcaacctctggattacaaaatttgtgaaagattgactggtattcttaactatgttgctccttttacgctatgtggatacgctgctttaatgcctttgtatcatgctattgcttcccgtatggctttcattttctcctccttgtataaatcctggttgctgtctctttatgaggagttgtggcccgttgtcaggcaacgtggcgtggtgtgcactgtgtttgctgacgcaacccccactggttggggcattgccaccacctgtcagctcctttccgggactttcgctttccccctccctattgccacggcggaactcatcgccgcctgccttgcccgctgctggacaggggctcggctgttgggcactgacaattccgtggtgttgtcggggaagctgacgtcctttccatggctgctcgcctgtgttgccacctggattctgcgcgggacgtccttctgctacgtcccttcggccctcaatccagcggaccttccttcccgcggcctgctgccggctctgcggcctcttccgcgtcttcgccttcgccctcagacgagtcggatctccctttgggccgcctccccgcctggttccgactgtgccttctagttgccagccatctgttgtttgcccctcccccgtgccttccttgaccctggaaggtgccactcccactgtcctttcctaataaaatgaggaaattgcatcgcattgtctgagtaggtgtcattctattctggggggtggggtggggcaggacagcaagggggaggattgggtagacaatagcaggcatgctggggatgcggtgggctctatggtcgagttagtttgctccagtaaagttgtttataataactactaaatccgcatgttacggaatttcttattaatttttttttcgtaaggaacaacggatcttaatgaatggccgcaaatggtatggaagctaatagcgcgggtgagagggtaattagccatgttcaccaatataacgctatcaggcaattctataagattctgaaataacttcgtatagcatacattatacgaagttataggccagcattaattcacttaaggagtctgtttatttaagttaaaccttaataaacggtcaccgcctccctaatacgcaggcgcagaaagggggctccgccccctttaacccccagggggctccgccccctgaaacccccaagggggctacgcccccttacaccccctaataaatattcaacaggaaaaccacctaatttaaattgccgaccacaaaccgtcacttagttcccctttttgcaacaacttctgcttttttccaactgccggaaaaccacataatttgcatggctaaccacaaactgatatgctaattaacttccacaaaacaacttccccttttaaaaccacacctacaaattaattattaaacacagtcacatcctgggaggtactaccacactataataccaagtgcacttccgaatggctgagtttatgccgctagacggagaacgcatcagttactgactgcggactgaacttgggcgggtgccgaaggtgagtgaaaccaccgaagtcaaggggcaattcgggctagttcagtctagcggaacgggcaagaaacttaaaattattttatttttcagatgggcgttgacattgattattga

SEQ ID NO: 2622 - DNA, 6473 bp, synthetic construct
  source 1..6473: mol_type = other DNA
gacggatcgggagatctcccgatcccctatggtgcactctcagtacaatctgctctgatgccgcatagttaagccagtatctgctccctgcttgtgtgttggaggtcgctgagtagtgcgcgagcaaaatttaagctacaacaaggcaaggcttgaccgacaattgcatgaagaatctgcttagggttaggcgttttgcgctgcttcgcgatgtacgggccagatatacgcgttgacattgattattgactagttattaatagtaatcaattacggggtcattagttcatagcccatatatggagttccgcgttacataacttacggtaaatggcccgcctggctgaccgcccaacgacccccgcccattgacgtcaataatgacgtatgttcccatagtaacgccaatagggactttccattgacgtcaatgggtggagtatttacggtaaactgcccacttggcagtacatcaagtgtatcatatgccaagtacgccccctattgacgtcaatgacggtaaatggcccgcctggcattatgcccagtacatgaccttatgggactttcctacttggcagtacatctacgtattagtcatcgctattaccatggtgatgcggttttggcagtacatcaatgggcgtggatagcggtttgactcacggggatttccaagtctccaccccattgacgtcaatgggagtttgttttggcaccaaaatcaacgggactttccaaaatgtcgtaacaactccgccccattgacgcaaatgggcggtaggcgtgtacggtgggaggtctatataagcagagctctctggctaactagagaacccactgcttactggcttatcgaaattaatacgactcactatagggagacccaagctggctagcgtttaaacttaagcttggtaccgagctcggatccactagtccagtgtggtggaattcgccaccatggtgcccaagaagaagaggaaagtctccaacctgctgactgtgcaccaaaacctgcctgccctccctgtggatgccacctctgatgaagtcaggaagaacctgatggacatgttcagggacaggcaggccttctctgaacacacctggaagatgctcctgtctgtgtgcagatcctgggctgcctggtgcaagctgaacaacaggaaatggttccctgctgaacctgaggatgtgagggactacctcctgtacctgcaagccagaggcctggctgtgaaaaccatccaacagcacctgggccagctcaacatgctgcacaggagatctggcctgcctcgcccttctgactccaatgctgtgtccctggtgatgaggagaatcagaaaggagaatgtggatgctggggagagagccaagcaggccctggcctttgaacgcactgactttgaccaagtcagatccctgatggagaactctgacagatgccaggacatcaggaacctggccttcctgggcattgcctacaacaccctgctgcgcattgccgaaattgccagaatcagagtgaaggacatctcccgcaccgatggtgggagaatgctgatccacattggcaggaccaagaccctggtgtccacagctggtgtggagaaggccctgtccctgggggttaccaagctggtggagagatggatctctgtgtctggtgtggctgatgaccccaacaactacctgttctgccgggtcagaaagaatggtgtggctgccccttctgccacctcccaactgtccacccgcgccctggaagggatctttgaggccacccaccgcctgatctatggtgccaaggatgactctgggcagagatacctggcctggtctggccactctgccagagtgggtgctgccagggacatggccagggctggtgtgtccatccctgaaatcatgcaggctggtggctggaccaatgtgaacatagtgatgaactacatcagaaacctggactctgagactggggccatggtgaggctgctcgaggatggggactgagcggccgctcgagtctagagggcccgtttaaacccgctgatcagcctcgactgtgccttctagttgccagccatctgttgtttgcccctcccccgtgccttccttgaccctggaaggtgccactcccactgtcctttcctaataaaatgaggaaattgcatcgcattgtctgagtaggtgtcattctattctggggggtggggtggggcaggacagcaagggggaggattgggaagacaatagcaggcatgctggggatgcggtgggctctatggcttctgaggcggaaagaaccagctggggctctagggggtatccccacgcgccctgtagcggcgcattaagcgcggcgggtgtggtggttacgcgcagcgtgaccgctacacttgccagcgccctagcgcccgctcctttcgctttcttcccttcctttctcgccacgttcgccggctttccccgtcaagctctaaatcgggggctccctttagggttccgatttagtgctttacggcacctcgaccccaaaaaacttgattagggtgatggttcacgtagtgggccatcgccctgatagacggtttttcgccctttgacgttggagtccacgttctttaatagtggactcttgttccaaactggaacaacactcaaccctatctcggtctattcttttgatttataagggattttgccgatttcggcctattggttaaaaaatgagctgatttaacaaaaatttaacgcgaattaattctgtggaatgtgtgtcagttagggtgtggaaagtccccaggctccccagcaggcagaagtatgcaaagcatgcatctcaattagtcagcaaccaggtgtggaaagtccccaggctccccagcaggcagaagtatgcaaagcatgcatctcaattagtcagcaaccatagtcccgcccctaactccgcccatcccgcccctaactccgcccagttccgcccattctccgccccatggctgactaattttttttatttatgcagaggccgaggccgcctctgcctctgagctattccagaagtagtgaggaggcttttttggaggcctaggcttttgcaaaaagctcccgggagcttgtatatccattttcggatctgatcaagagacaggatgaggatcgtttcgcatgattgaacaagatggattgcacgcaggttctccggccgcttgggtggagaggctattcggctatgactgggcacaacagacaatcggctgctctgatgccgccgtgttccggctgtcagcgcaggggcgcccggttctttttgtcaagaccgacctgtccggtgccctgaatgaactgcaggacgaggcagcgcggctatcgtggctggccacgacgggcgttccttgcgcagctgtgctcgacgttgtcactgaagcgggaagggactggctgctattgggcgaagtgccggggcaggatctcctgtcatctcaccttgctcctgccgagaaagtatccatcatggctgatgcaatgcggcggctgcatacgcttgatccggctacctgcccattcgaccaccaagcgaaacatcgcatcgagcgagcacgtactcggatggaagccggtcttgtcgatcaggatgatctggacgaagagcatcaggggctcgcgccagccgaactgttcgccaggctcaaggcgcgcatgcccgacggcgaggatctcgtcgtgacccatggcgatgcctgcttgccgaatatcatggtggaaaatggccgcttttctggattcatcgactgtggccggctgggtgtggcggaccgctatcaggacatagcgttggctacccgtgatattgctgaagagcttggcggcgaatgggctgaccgcttcctcgtgctttacggtatcgccgctcccgattcgcagcgcatcgccttctatcgccttcttgacgagttcttctgagcgggactctggggttcgaaatgaccgaccaagcgacgcccaacctgccatcacgagatttcgattccaccgccgccttctatgaaaggttgggcttcggaatcgttttccgggacgccggctggatgatcctccagcgcggggatctcatgctggagttcttcgcccaccccaacttgtttattgcagcttataatggttacaaataaagcaatagcatcacaaatttcacaaataaagcatttttttcactgcattctagttgtggtttgtccaaactcatcaatgtatcttatcatgtctgtataccgtcgacctctagctagagcttggcgtaatcatggtcatagctgtttcctgtgtgaaattgttatccgctcacaattccacacaacatacgagccggaagcataaagtgtaaagcctggggtgcctaatgagtgagctaactcacattaattgcgttgcgctcactgcccgctttccagtcgggaaacctgtcgtgccagctgcattaatgaatcggccaacgcgcggggagaggcggtttgcgtattgggcgctcttccgcttcctcgctcactgactcgctgcgctcggtcgttcggctgcggcgagcggtatcagctcactcaaaggcggtaatacggttatccacagaatcaggggataacgcaggaaagaacatgtgagcaaaaggccagcaaaaggccaggaaccgtaaaaaggccgcgttgctggcgtttttccataggctccgcccccctgacgagcatcacaaaaatcgacgctcaagtcagaggtggcgaaacccgacaggactataaagataccaggcgtttccccctggaagctccctcgtgcgctctcctgttccgaccctgccgcttaccggatacctgtccgcctttctcccttcgggaagcgtggcgctttctcatagctcacgctgtaggtatctcagttcggtgtaggtcgttcgctccaagctgggctgtgtgcacgaaccccccgttcagcccgaccgctgcgccttatccggtaactatcgtcttgagtccaacccggtaagacacgacttatcgccactggcagcagccactggtaacaggattagcagagcgaggtatgtaggcggtgctacagagttcttgaagtggtggcctaactacggctacactagaagaacagtatttggtatctgcgctctgctgaagccagttaccttcggaaaaagagttggtagctcttgatccggcaaacaaaccaccgctggtagcggtggtttttttgtttgcaagcagcagattacgcgcagaaaaaaaggatctcaagaagatcctttgatcttttctacggggtctgacgctcagtggaacgaaaactcacgttaagggattttggtcatgagattatcaaaaaggatcttcacctagatccttttaaattaaaaatgaagttttaaatcaatctaaagtatatatgagtaaacttggtctgacagttaccaatgcttaatcagtgaggcacctatctcagcgatctgtctatttcgttcatccatagttgcctgactccccgtcgtgtagataactacgatacgggagggcttaccatctggccccagtgctgcaatgataccgcgagacccacgctcaccggctccagatttatcagcaataaaccagccagccggaagggccgagcgcagaagtggtcctgcaactttatccgcctccatccagtctattaattgttgccgggaagctagagtaagtagttcgccagttaatagtttgcgcaacgttgttgccattgctacaggcatcgtggtgtcacgctcgtcgtttggtatggcttcattcagctccggttcccaacgatcaaggcgagttacatgatcccccatgttgtgcaaaaaagcggttagctccttcggtcctccgatcgttgtcagaagtaagttggccgcagtgttatcactcatggttatggcagcactgcataattctcttactgtcatgccatccgtaagatgcttttctgtgactggtgagtactcaaccaagtcattctgagaatagtgtatgcggcgaccgagttgctcttgcccggcgtcaatacgggataataccgcgccacatagcagaactttaaaagtgctcatcattggaaaacgttcttcggggcgaaaactctcaaggatcttaccgctgttgagatccagttcgatgtaacccactcgtgcacccaactgatcttcagcatcttttactttcaccagcgtttctgggtgagcaaaaacaggaaggcaaaatgccgcaaaaaagggaataagggcgacacggaaatgttgaatactcatactcttcctttttcaatattattgaagcatttatcagggttattgtctcatgagcggatacatatttgaatgtatttagaaaaataaacaaataggggttccgcgcacatttccccgaaaagtgccacctgacgtc

SEQ ID NO: 2623 - DNA, 5500 bp, synthetic construct
  source 1..5500: mol_type = other DNA
tttccataggctccgcccccctgacgagcatcacaaaaatcgacgctcaagtcagaggtggcgaaacccgacaggactataaagataccaggcgtttccccctggaagctccctcgtgcgctctcctgttccgaccctgccgcttaccggatacctgtccgcctttctcccttcgggaagcgtggcgctttctcatagctcacgctgtaggtatctcagttcggtgtaggtcgttcgctccaagctgggctgtgtgcacgaaccccccgttcagcccgaccgctgcgccttatccggtaactatcgtcttgagtccaacccggtaagacacgacttatcgccactggcagcagccactggtaacaggattagcagagcgaggtatgtaggcggtgctacagagttcttgaagtggtggcctaactacggctacactagaagaacagtatttggtatctgcgctctgctgaagccagttaccttcggaaaaagagttggtagctcttgatccggcaaacaaaccaccgctggtagcggtggtttttttgtttgcaagcagcagattacgcgcagaaaaaaaggatctcaagaagatcctttgatcttttctacggggtctgacgctcagtggaacgaaaactcacgttaagggattttggtcatgagattatcaaaaaggatcttcacctagatccttttaaattaaaaatgaagttttaaatcaagcccaatctgaataatgttacaaccaattaaccaattctgattagaaaaactcatcgagcatcaaatgaaactgcaatttattcatatcaggattatcaataccatatttttgaaaaagccgtttctgtaatgaaggagaaaactcaccgaggcagttccataggatggcaagatcctggtatcggtctgcgattccgactcgtccaacatcaatacaacctattaatttcccctcgtcaaaaataaggttatcaagtgagaaatcaccatgagtgacgactgaatccggtgagaatggcaaaagtttatgcatttctttccagacttgttcaacaggccagccattacgctcgtcatcaaaatcactcgcatcaaccaaaccgttattcattcgtgattgcgcctgagcaagacgaaatacgcgatcgctgttaaaaggacaattacaaacaggaatcgaatgcaaccggcgcaggaacactgccagcgcatcaacaatattttcacctgaatcaggatattcttctaatacctggaatgctgtttttccggggatcgcagtggtgagtaaccatgcatcatcaggagtacggataaaatgcttgatggtcggaagaggcataaattccgtcagccagtttagtctgaccatctcatctgtaacatcattggcaacgctacctttgccatgtttcagaaacaactctggcgcatcgggcttcccatacaagcgatagattgtcgcacctgattgcccgacattatcgcgagcccatttatacccatataaatcagcatccatgttggaatttaatcgcggcctcgacgtttcccgttgaatatggctcataacaccccttgtattactgtttatgtaagcagacagttttattgttcatgatgatatatttttatcttgtgcaatgtaacatcagagattttgagacacgggccagagctggcgtttcggtgatgacggtgaaaacctctgacacatgcagctcccgaagacggtcacagcttgtctgtaagcggatgccgggagcagacaagcccgtcagggcgcgtcagcgggtgttggcgggtgtcggggctggcttaactatgcggcatcagagcagattgtactgagagtgcaccatatgcggtgtgaaataccgcacagatgcgtaaggagaaaataccgcatcaggcgccattcgccattcaggctgcgcaactgttgggaagggcgatcggtgcgggcctcttcgctattacgccagctggcgaaagggggatgtgctgcaaggcgattaagttgggtaacgccagggttttcccagtcacgacgttgtaaaacgacggccagagaattcgagctcggtacctcgcgaatacatctagatatctcggccggcttgtcgacgacggcggtctccgtcgtcaggatcatccgggctaaactacgcctgcaaactttcactctcggtgtccatttatataagataaaacttaaataaacatccaccactctcccaaatacgcaggcgcacaagggggctccgcccccttaaacccccaagggggctccgcccccttaaacccccaagggggctccgcccccttacaccccctaataaatattcaacaggaaaaccacctaattagaattgccgaccacaaaccgtcacttacttctcctttttgcacttacttcctcttttacttattattattcattacattaattaataatcactgtaattccggggaggagctaacaatctatataactaactacacttccgaatggctgagtttatgccgccagacggtgacgggatcacttcagtgactccaggctgaacttgggcgggagccgaaggtgagtgcaaccaccgtagtctaggggcaattcgggctagttcagtatggcggaacgggcaagaaacttaaatattattattttacagcggtatgggcgttgacattgattattgactagttattaatagtaatcaattacggggtcattagttcatagcccatatatggagttccgcgttacataacttacggtaaatggcccgcctggctgaccgcccaacgacccccgcccattgacgtcaataatgacgtatgttcccatagtaacgccaatagggactttccattgacgtcaatgggtggagtatttacggtaaactgcccacttggcagtacatcaagtgtatcatatgccaagtacgccccctattgacgtcaatgacggtaaatggcccgcctggcattatgcccagtacatgaccttatgggactttcctacttggcagtacatctacgtattagtcatcgctattaccatggtgatgcggttttggcagtacatcaatgggcgtggatagcggtttgactcacggggatttccaagtctccaccccattgacgtcaatgggagtttgttttggcaccaaaatcaacgggactttccaaaatgtcgtaacaactccgccccattgacgcaaatgggcggtaggcgtgtacggtgggaggtctatataagcagagctctctggctaactggatctacaaaaaagcagatccaccggtcgccaccatggtgagcaagggcgaggagctgttcaccggggtggtgcccatcctggtcgagctggacggcgacgtaaacggccacaagttcagcgtgtccggcgagggcgagggcgatgccacctacggcaagctgaccctgaagttcatctgcaccaccggcaagctgcccgtgccctggcccaccctcgtgaccaccctgacctacggcgtgcagtgcttcagccgctaccccgaccacatgaagcagcacgacttcttcaagtccgccatgcccgaaggctacgtccaggagcgcaccatcttcttcaaggacgacggcaactacaagacccgcgccgaggtgaagttcgagggcgacaccctggtgaaccgcatcgagctgaagggcatcgacttcaaggaggacggcaacatcctggggcacaagctggagtacaactacaacagccacaacgtctatatcatggccgacaagcagaagaacggcatcaaggtgaacttcaagatccgccacaacatcgaggacggcagcgtgcagctcgccgaccactaccagcagaacacccccatcggcgacggccccgtgctgctgcccgacaaccactacctgagcacccagtccgccctgagcaaagaccccaacgagaagcgcgatcacatggtcctgctggagttcgtgaccgccgccgggatcactctcggcatggacgagctgtacaagtaataaaatcaacctctggattacaaaatttgtgaaagattgactggtattcttaactatgttgctccttttacgctatgtggatacgctgctttaatgcctttgtatcatgctattgcttcccgtatggctttcattttctcctccttgtataaatcctggttgctgtctctttatgaggagttgtggcccgttgtcaggcaacgtggcgtggtgtgcactgtgtttgctgacgcaacccccactggttggggcattgccaccacctgtcagctcctttccgggactttcgctttccccctccctattgccacggcggaactcatcgccgcctgccttgcccgctgctggacaggggctcggctgttgggcactgacaattccgtggtgttgtcggggaagctgacgtcctttccatggctgctcgcctgtgttgccacctggattctgcgcgggacgtccttctgctacgtcccttcggccctcaatccagcggaccttccttcccgcggcctgctgccggctctgcggcctcttccgcgtcttcgccttcgccctcagacgagtcggatctccctttgggccgcctccccgcctggttccgactgtgccttctagttgccagccatctgttgtttgcccctcccccgtgccttccttgaccctggaaggtgccactcccactgtcctttcctaataaaatgaggaaattgcatcgcattgtctgagtaggtgtcattctattctggggggtggggtggggcaggacagcaagggggaggattgggtagacaatagcaggcatgctggggatgcggtgggctctatggtcgagttagtttgctccagtaaagttgtttataataactactaaatccgcatgttacggaatttcttattaatttttttttcgtaaggaacaacggatcttgaatctggtcgtggtttgtctggtcaaccaccgcggtctcagtggtgtacggtacaaaccccgacgatatcggatcccgggcccgtcgactgcagaggcctgcatgcaagcttggtgtaatcatggtcatagctgtttcctgtgtgaaattgttatccgctcacaattccacacaacatacgagccggaagcataaagtgtaaagcctggggtgcctaatgagtgagctaactcacattaattgcgttgcgctcactgcccgctttccagtcgggaaacctgtcgtgccagctgcattaatgaatcggccaacgcgcggggagaggcggtttgcgtattgggcgctcttccgcttcctcgctcactgactcgctgcgctcggtcgttcggctgcggcgagcggtatcagctcactcaaaggcggtaatacggttatccacagaatcaggggataacgcaggaaagaacatgtgagcaaaaggccagcaaaaggccaggaaccgtaaaaaggccgcgttgctggcgtt

SEQ ID NO: 2624 - DNA, 2867 bp, synthetic construct
  source 1..2867: mol_type = other DNA
taaactacgcctgcaaactttcactctcggtgtccatttatataagataaaacttaaataaacatccaccactctcccaaatacgcaggcgcacaagggggctccgcccccttaaacccccaagggggctccgcccccttaaacccccaagggggctccgcccccttacaccccctaataaatattcaacaggaaaaccacctaattagaattgccgaccacaaaccgtcacttacttctcctttttgcacttacttcctcttttacttattattattcattacattaattaataatcactgtaattccggggaggagctaacaatctatataactaactacacttccgaatggctgagtttatgccgccagacggtgacgggatcacttcagtgactccaggctgaacttgggcgggagccgaaggtgagtgcaaccaccgtagtctaggggcaattcgggctagttcagtatggcggaacgggcaagaaacttaaatattattattttacagcggtatgggcgttgacattgattattgactagttattaatagtaatcaattacggggtcattagttcatagcccatatatggagttccgcgttacataacttacggtaaatggcccgcctggctgaccgcccaacgacccccgcccattgacgtcaataatgacgtatgttcccatagtaacgccaatagggactttccattgacgtcaatgggtggagtatttacggtaaactgcccacttggcagtacatcaagtgtatcatatgccaagtacgccccctattgacgtcaatgacggtaaatggcccgcctggcattatgcccagtacatgaccttatgggactttcctacttggcagtacatctacgtattagtcatcgctattaccatggtgatgcggttttggcagtacatcaatgggcgtggatagcggtttgactcacggggatttccaagtctccaccccattgacgtcaatgggagtttgttttggcaccaaaatcaacgggactttccaaaatgtcgtaacaactccgccccattgacgcaaatgggcggtaggcgtgtacggtgggaggtctatataagcagagctctctggctaactggatctacaaaaaagcagatccaccggtcgccaccatggtgagcaagggcgaggagctgttcaccggggtggtgcccatcctggtcgagctggacggcgacgtaaacggccacaagttcagcgtgtccggcgagggcgagggcgatgccacctacggcaagctgaccctgaagttcatctgcaccaccggcaagctgcccgtgccctggcccaccctcgtgaccaccctgacctacggcgtgcagtgcttcagccgctaccccgaccacatgaagcagcacgacttcttcaagtccgccatgcccgaaggctacgtccaggagcgcaccatcttcttcaaggacgacggcaactacaagacccgcgccgaggtgaagttcgagggcgacaccctggtgaaccgcatcgagctgaagggcatcgacttcaaggaggacggcaacatcctggggcacaagctggagtacaactacaacagccacaacgtctatatcatggccgacaagcagaagaacggcatcaaggtgaacttcaagatccgccacaacatcgaggacggcagcgtgcagctcgccgaccactaccagcagaacacccccatcggcgacggccccgtgctgctgcccgacaaccactacctgagcacccagtccgccctgagcaaagaccccaacgagaagcgcgatcacatggtcctgctggagttcgtgaccgccgccgggatcactctcggcatggacgagctgtacaagtaataaaatcaacctctggattacaaaatttgtgaaagattgactggtattcttaactatgttgctccttttacgctatgtggatacgctgctttaatgcctttgtatcatgctattgcttcccgtatggctttcattttctcctccttgtataaatcctggttgctgtctctttatgaggagttgtggcccgttgtcaggcaacgtggcgtggtgtgcactgtgtttgctgacgcaacccccactggttggggcattgccaccacctgtcagctcctttccgggactttcgctttccccctccctattgccacggcggaactcatcgccgcctgccttgcccgctgctggacaggggctcggctgttgggcactgacaattccgtggtgttgtcggggaagctgacgtcctttccatggctgctcgcctgtgttgccacctggattctgcgcgggacgtccttctgctacgtcccttcggccctcaatccagcggaccttccttcccgcggcctgctgccggctctgcggcctcttccgcgtcttcgccttcgccctcagacgagtcggatctccctttgggccgcctccccgcctggttccgactgtgccttctagttgccagccatctgttgtttgcccctcccccgtgccttccttgaccctggaaggtgccactcccactgtcctttcctaataaaatgaggaaattgcatcgcattgtctgagtaggtgtcattctattctggggggtggggtggggcaggacagcaagggggaggattgggtagacaatagcaggcatgctggggatgcggtgggctctatggtcgagttagtttgctccagtaaagttgtttataataactactaaatccgcatgttacggaatttcttattaatttttttttcgtaaggaacaacggatcttgaatctggtcgtggtttgtctggtcaaccaccgcggtctccgtcgtcaggatcatccgggc

SEQ ID NO: 2625 - DNA, 5576 bp, synthetic construct
  source 1..5576: mol_type = other DNA
gcgtttcggtgatgacggtgaaaacctctgacacatgcagctcccgaagacggtcacagcttgtctgtaagcggatgccgggagcagacaagcccgtcagggcgcgtcagcgggtgttggcgggtgtcggggctggcttaactatgcggcatcagagcagattgtactgagagtgcaccatatgcggtgtgaaataccgcacagatgcgtaaggagaaaataccgcatcaggcgccattcgccattcaggctgcgcaactgttgggaagggcgatcggtgcgggcctcttcgctattacgccagctggcgaaagggggatgtgctgcaaggcgattaagttgggtaacgccagggttttcccagtcacgacgttgtaaaacgacggccagagaattcgagctcggtacctcgcgaatacatctagatatctcggccggcttgtcgacgacggcggtctccgtcgtcaggatcatccgggcaggccagcattaattcacttaaggagtctgtttatttaagttaaaccttaataaacggtcaccgcctccctaatacgcaggcgcagaaagggggctccgccccctttaacccccagggggctccgccccctgaaacccccaagggggctacgcccccttacaccccctaataaatattcaacaggaaaaccacctaatttaaattgccgaccacaaaccgtcacttagttcccctttttgcaacaacttctgcttttttccaactgccggaaaaccacataatttgcatggctaaccacaaactgatatgctaattaacttccacaaaacaacttccccttttaaaaccacacctacaaattaattattaaacacagtcacatcctgggaggtactaccacactataataccaagtgcacttccgaatggctgagtttatgccgctagacggagaacgcatcagttactgactgcggactgaacttgggcgggtgccgaaggtgagtgaaaccaccgaagtcaaggggcaattcgggctagttcagtctagcggaacgggcaagaaacttaaaattattttatttttcagcggtatgggcgttgacattgattattgactagttattaatagtaatcaattacggggtcattagttcatagcccatatatggagttccgcgttacataacttacggtaaatggcccgcctggctgaccgcccaacgacccccgcccattgacgtcaataatgacgtatgttcccatagtaacgccaatagggactttccattgacgtcaatgggtggagtatttacggtaaactgcccacttggcagtacatcaagtgtatcatatgccaagtacgccccctattgacgtcaatgacggtaaatggcccgcctggcattatgcccagtacatgaccttatgggactttcctacttggcagtacatctacgtattagtcatcgctattaccatggtgatgcggttttggcagtacatcaatgggcgtggatagcggtttgactcacggggatttccaagtctccaccccattgacgtcaatgggagtttgttttggcaccaaaatcaacgggactttccaaaatgtcgtaacaactccgccccattgacgcaaatgggcggtaggcgtgtacggtgggaggtctatataagcagagctctctggctaactggatctacaaaaaagcagatccaccggtcgccaccatggtgagcaagggcgaggagctgttcaccggggtggtgcccatcctggtcgagctggacggcgacgtaaacggccacaagttcagcgtgtccggcgagggcgagggcgatgccacctacggcaagctgaccctgaagttcatctgcaccaccggcaagctgcccgtgccctggcccaccctcgtgaccaccctgacctacggcgtgcagtgcttcagccgctaccccgaccacatgaagcagcacgacttcttcaagtccgccatgcccgaaggctacgtccaggagcgcaccatcttcttcaaggacgacggcaactacaagacccgcgccgaggtgaagttcgagggcgacaccctggtgaaccgcatcgagctgaagggcatcgacttcaaggaggacggcaacatcctggggcacaagctggagtacaactacaacagccacaacgtctatatcatggccgacaagcagaagaacggcatcaaggtgaacttcaagatccgccacaacatcgaggacggcagcgtgcagctcgccgaccactaccagcagaacacccccatcggcgacggccccgtgctgctgcccgacaaccactacctgagcacccagtccgccctgagcaaagaccccaacgagaagcgcgatcacatggtcctgctggagttcgtgaccgccgccgggatcactctcggcatggacgagctgtacaagtaataaaatcaacctctggattacaaaatttgtgaaagattgactggtattcttaactatgttgctccttttacgctatgtggatacgctgctttaatgcctttgtatcatgctattgcttcccgtatggctttcattttctcctccttgtataaatcctggttgctgtctctttatgaggagttgtggcccgttgtcaggcaacgtggcgtggtgtgcactgtgtttgctgacgcaacccccactggttggggcattgccaccacctgtcagctcctttccgggactttcgctttccccctccctattgccacggcggaactcatcgccgcctgccttgcccgctgctggacaggggctcggctgttgggcactgacaattccgtggtgttgtcggggaagctgacgtcctttccatggctgctcgcctgtgttgccacctggattctgcgcgggacgtccttctgctacgtcccttcggccctcaatccagcggaccttccttcccgcggcctgctgccggctctgcggcctcttccgcgtcttcgccttcgccctcagacgagtcggatctccctttgggccgcctccccgcctggttccgactgtgccttctagttgccagccatctgttgtttgcccctcccccgtgccttccttgaccctggaaggtgccactcccactgtcctttcctaataaaatgaggaaattgcatcgcattgtctgagtaggtgtcattctattctggggggtggggtggggcaggacagcaagggggaggattgggtagacaatagcaggcatgctggggatgcggtgggctctatggtcgagttagtttgctccagtaaagttgtttataataactactaaatccgcatgttacggaatttcttattaatttttttttcgtaaggaacaacggatcttgaatctggtcgtggtttgtctggtcaaccaccgcggtctcagtggtgtacggtacaaaccccgacgatatcggatcccgggcccgtcgactgcagaggcctgcatgcaagcttggtgtaatcatggtcatagctgtttcctgtgtgaaattgttatccgctcacaattccacacaacatacgagccggaagcataaagtgtaaagcctggggtgcctaatgagtgagctaactcacattaattgcgttgcgctcactgcccgctttccagtcgggaaacctgtcgtgccagctgcattaatgaatcggccaacgcgcggggagaggcggtttgcgtattgggcgctcttccgcttcctcgctcactgactcgctgcgctcggtcgttcggctgcggcgagcggtatcagctcactcaaaggcggtaatacggttatccacagaatcaggggataacgcaggaaagaacatgtgagcaaaaggccagcaaaaggccaggaaccgtaaaaaggccgcgttgctggcgtttttccataggctccgcccccctgacgagcatcacaaaaatcgacgctcaagtcagaggtggcgaaacccgacaggactataaagataccaggcgtttccccctggaagctccctcgtgcgctctcctgttccgaccctgccgcttaccggatacctgtccgcctttctcccttcgggaagcgtggcgctttctcatagctcacgctgtaggtatctcagttcggtgtaggtcgttcgctccaagctgggctgtgtgcacgaaccccccgttcagcccgaccgctgcgccttatccggtaactatcgtcttgagtccaacccggtaagacacgacttatcgccactggcagcagccactggtaacaggattagcagagcgaggtatgtaggcggtgctacagagttcttgaagtggtggcctaactacggctacactagaagaacagtatttggtatctgcgctctgctgaagccagttaccttcggaaaaagagttggtagctcttgatccggcaaacaaaccaccgctggtagcggtggtttttttgtttgcaagcagcagattacgcgcagaaaaaaaggatctcaagaagatcctttgatcttttctacggggtctgacgctcagtggaacgaaaactcacgttaagggattttggtcatgagattatcaaaaaggatcttcacctagatccttttaaattaaaaatgaagttttaaatcaagcccaatctgaataatgttacaaccaattaaccaattctgattagaaaaactcatcgagcatcaaatgaaactgcaatttattcatatcaggattatcaataccatatttttgaaaaagccgtttctgtaatgaaggagaaaactcaccgaggcagttccataggatggcaagatcctggtatcggtctgcgattccgactcgtccaacatcaatacaacctattaatttcccctcgtcaaaaataaggttatcaagtgagaaatcaccatgagtgacgactgaatccggtgagaatggcaaaagtttatgcatttctttccagacttgttcaacaggccagccattacgctcgtcatcaaaatcactcgcatcaaccaaaccgttattcattcgtgattgcgcctgagcaagacgaaatacgcgatcgctgttaaaaggacaattacaaacaggaatcgaatgcaaccggcgcaggaacactgccagcgcatcaacaatattttcacctgaatcaggatattcttctaatacctggaatgctgtttttccggggatcgcagtggtgagtaaccatgcatcatcaggagtacggataaaatgcttgatggtcggaagaggcataaattccgtcagccagtttagtctgaccatctcatctgtaacatcattggcaacgctacctttgccatgtttcagaaacaactctggcgcatcgggcttcccatacaagcgatagattgtcgcacctgattgcccgacattatcgcgagcccatttatacccatataaatcagcatccatgttggaatttaatcgcggcctcgacgtttcccgttgaatatggctcataacaccccttgtattactgtttatgtaagcagacagttttattgttcatgatgatatatttttatcttgtgcaatgtaacatcagagattttgagacacgggccagagctg

SEQ ID NO: 2626 - DNA, 2943 bp, synthetic construct
  source 1..2943: mol_type = other DNA
aggccagcattaattcacttaaggagtctgtttatttaagttaaaccttaataaacggtcaccgcctccctaatacgcaggcgcagaaagggggctccgccccctttaacccccagggggctccgccccctgaaacccccaagggggctacgcccccttacaccccctaataaatattcaacaggaaaaccacctaatttaaattgccgaccacaaaccgtcacttagttcccctttttgcaacaacttctgcttttttccaactgccggaaaaccacataatttgcatggctaaccacaaactgatatgctaattaacttccacaaaacaacttccccttttaaaaccacacctacaaattaattattaaacacagtcacatcctgggaggtactaccacactataataccaagtgcacttccgaatggctgagtttatgccgctagacggagaacgcatcagttactgactgcggactgaacttgggcgggtgccgaaggtgagtgaaaccaccgaagtcaaggggcaattcgggctagttcagtctagcggaacgggcaagaaacttaaaattattttatttttcagcggtatgggcgttgacattgattattgactagttattaatagtaatcaattacggggtcattagttcatagcccatatatggagttccgcgttacataacttacggtaaatggcccgcctggctgaccgcccaacgacccccgcccattgacgtcaataatgacgtatgttcccatagtaacgccaatagggactttccattgacgtcaatgggtggagtatttacggtaaactgcccacttggcagtacatcaagtgtatcatatgccaagtacgccccctattgacgtcaatgacggtaaatggcccgcctggcattatgcccagtacatgaccttatgggactttcctacttggcagtacatctacgtattagtcatcgctattaccatggtgatgcggttttggcagtacatcaatgggcgtggatagcggtttgactcacggggatttccaagtctccaccccattgacgtcaatgggagtttgttttggcaccaaaatcaacgggactttccaaaatgtcgtaacaactccgccccattgacgcaaatgggcggtaggcgtgtacggtgggaggtctatataagcagagctctctggctaactggatctacaaaaaagcagatccaccggtcgccaccatggtgagcaagggcgaggagctgttcaccggggtggtgcccatcctggtcgagctggacggcgacgtaaacggccacaagttcagcgtgtccggcgagggcgagggcgatgccacctacggcaagctgaccctgaagttcatctgcaccaccggcaagctgcccgtgccctggcccaccctcgtgaccaccctgacctacggcgtgcagtgcttcagccgctaccccgaccacatgaagcagcacgacttcttcaagtccgccatgcccgaaggctacgtccaggagcgcaccatcttcttcaaggacgacggcaactacaagacccgcgccgaggtgaagttcgagggcgacaccctggtgaaccgcatcgagctgaagggcatcgacttcaaggaggacggcaacatcctggggcacaagctggagtacaactacaacagccacaacgtctatatcatggccgacaagcagaagaacggcatcaaggtgaacttcaagatccgccacaacatcgaggacggcagcgtgcagctcgccgaccactaccagcagaacacccccatcggcgacggccccgtgctgctgcccgacaaccactacctgagcacccagtccgccctgagcaaagaccccaacgagaagcgcgatcacatggtcctgctggagttcgtgaccgccgccgggatcactctcggcatggacgagctgtacaagtaataaaatcaacctctggattacaaaatttgtgaaagattgactggtattcttaactatgttgctccttttacgctatgtggatacgctgctttaatgcctttgtatcatgctattgcttcccgtatggctttcattttctcctccttgtataaatcctggttgctgtctctttatgaggagttgtggcccgttgtcaggcaacgtggcgtggtgtgcactgtgtttgctgacgcaacccccactggttggggcattgccaccacctgtcagctcctttccgggactttcgctttccccctccctattgccacggcggaactcatcgccgcctgccttgcccgctgctggacaggggctcggctgttgggcactgacaattccgtggtgttgtcggggaagctgacgtcctttccatggctgctcgcctgtgttgccacctggattctgcgcgggacgtccttctgctacgtcccttcggccctcaatccagcggaccttccttcccgcggcctgctgccggctctgcggcctcttccgcgtcttcgccttcgccctcagacgagtcggatctccctttgggccgcctccccgcctggttccgactgtgccttctagttgccagccatctgttgtttgcccctcccccgtgccttccttgaccctggaaggtgccactcccactgtcctttcctaataaaatgaggaaattgcatcgcattgtctgagtaggtgtcattctattctggggggtggggtggggcaggacagcaagggggaggattgggtagacaatagcaggcatgctggggatgcggtgggctctatggtcgagttagtttgctccagtaaagttgtttataataactactaaatccgcatgttacggaatttcttattaatttttttttcgtaaggaacaacggatcttgaatctggtcgtggtttgtctggtcaaccaccgcggtctccgtcgtcaggatcatccgggc

SEQ ID NO: 2627 - DNA, 7003 bp, synthetic construct
  source 1..7003: mol_type = other DNA
gacggatcgggagatctcccgatcccctatggtgcactctcagtacaatctgctctgatgccgcatagttaagccagtatctgctccctgcttgtgtgttggaggtcgctgagtagtgcgcgagcaaaatttaagctacaacaaggcaaggcttgaccgacaattgcatgaagaatctgcttagggttaggcgttttgcgctgcttcgcgatgtacgggccagatatacgcgttgacattgattattgactagttattaatagtaatcaattacggggtcattagttcatagcccatatatggagttccgcgttacataacttacggtaaatggcccgcctggctgaccgcccaacgacccccgcccattgacgtcaataatgacgtatgttcccatagtaacgccaatagggactttccattgacgtcaatgggtggagtatttacggtaaactgcccacttggcagtacatcaagtgtatcatatgccaagtacgccccctattgacgtcaatgacggtaaatggcccgcctggcattatgcccagtacatgaccttatgggactttcctacttggcagtacatctacgtattagtcatcgctattaccatggtgatgcggttttggcagtacatcaatgggcgtggatagcggtttgactcacggggatttccaagtctccaccccattgacgtcaatgggagtttgttttggcaccaaaatcaacgggactttccaaaatgtcgtaacaactccgccccattgacgcaaatgggcggtaggcgtgtacggtgggaggtctatataagcagagctctctggctaactagagaacccactgcttactggcttatcgaaattaatacgactcactatagggagacccaagctggctagcgtttaaacttaagcttggtaccggtctcacaccatgccaaaaaagaaaagaaaagtgtatccctatgatgtccccgattatgccggttcaagagccctggtcgtgattagactgagccgagtgacagacgccaccacaagtcccgagagacagctggaatcatgccagcagctctgtgctcagcggggttgggatgtggtcggcgtggcagaggatctggacgtgagcggggccgtcgatccattcgacagaaagaggaggcccaacctggcaagatggctcgctttcgaggaacagccctttgatgtgatcgtcgcctacagagtggaccggctgacccgctcaattcgacatctccagcagctggtgcattgggctgaggaccacaagaaactggtggtcagcgcaacagaagcccacttcgatactaccacaccttttgccgctgtggtcatagcactgatgggcactgtggcccagatggagctcgaagctatcaaggagcgaaacaggagcgcagcccatttcaatattagggccggtaaatacagaggctccctgcccccttggggatatctccctaccagggtggatggggagtggagactggtgccagaccccgtccagagagagcggattctggaagtgtaccacagagtggtcgataaccacgaaccactccatctggtggcacacgacctgaatagacgcggcgtgctctctccaaaggattattttgctcagctgcagggaagagagccacagggaagagaatggagtgctactgcactgaagagatctatgatcagtgaggctatgctgggttacgcaacactcaatggcaaaactgtccgggacgatgacggagcccctctggtgagggctgagcctattctcaccagagagcagctcgaagctctgcgggcagaactggtcaagactagtcgcgccaaaccggccgtgagcaccccaagcctgctcctgagggtgctgttctgcgccgtctgtggagagccagcatacaagtttgccggcggagggcgcaaacatccccgctatcgatgcaggagcatggggttccctaagcactgtggaaacgggacagtggccatggctgagtgggacgccttttgcgaggaacaggtgctggatctcctgggtgacgctgagcggctggaaaaagtgtgggtggcaggatctgactccgctgtggagctggcagaagtcaatgccgagctcgtggatctgacttccctcatcggatctcctgcatatagagctgggtccccacagagagaagctctggacgcacgaattgctgcactcgctgctagacaggaggaactggagggcctggaggccaggccctctggatgggagtggcgagaaaccggacagaggtttggggattggtggagggagcaggacaccgcagccaagaacacatggctgagatccatgaatgtccggctcacattcgacgtgcgcggtggcctgactcgaaccatcgattttggcgacctccaggagtatgaacagcacctgagactggggtccgtggtcgaaagactgcacactgggatgtcctaataatgagaccggatccactagtccagtgtggtggaattctgcagatatccagcacagtggcggccgctcgagtctagagggcccgtttaaacccgctgatcagcctcgactgtgccttctagttgccagccatctgttgtttgcccctcccccgtgccttccttgaccctggaaggtgccactcccactgtcctttcctaataaaatgaggaaattgcatcgcattgtctgagtaggtgtcattctattctggggggtggggtggggcaggacagcaagggggaggattgggaagacaatagcaggcatgctggggatgcggtgggctctatggcttctgaggcggaaagaaccagctggggctctagggggtatccccacgcgccctgtagcggcgcattaagcgcggcgggtgtggtggttacgcgcagcgtgaccgctacacttgccagcgccctagcgcccgctcctttcgctttcttcccttcctttctcgccacgttcgccggctttccccgtcaagctctaaatcgggggctccctttagggttccgatttagtgctttacggcacctcgaccccaaaaaacttgattagggtgatggttcacgtagtgggccatcgccctgatagacggtttttcgccctttgacgttggagtccacgttctttaatagtggactcttgttccaaactggaacaacactcaaccctatctcggtctattcttttgatttataagggattttgccgatttcggcctattggttaaaaaatgagctgatttaacaaaaatttaacgcgaattaattctgtggaatgtgtgtcagttagggtgtggaaagtccccaggctccccagcaggcagaagtatgcaaagcatgcatctcaattagtcagcaaccaggtgtggaaagtccccaggctccccagcaggcagaagtatgcaaagcatgcatctcaattagtcagcaaccatagtcccgcccctaactccgcccatcccgcccctaactccgcccagttccgcccattctccgccccatggctgactaattttttttatttatgcagaggccgaggccgcctctgcctctgagctattccagaagtagtgaggaggcttttttggaggcctaggcttttgcaaaaagctcccgggagcttgtatatccattttcggatctgatcaagagacaggatgaggatcgtttcgcatgattgaacaagatggattgcacgcaggttctccggccgcttgggtggagaggctattcggctatgactgggcacaacagacaatcggctgctctgatgccgccgtgttccggctgtcagcgcaggggcgcccggttctttttgtcaagaccgacctgtccggtgccctgaatgaactgcaggacgaggcagcgcggctatcgtggctggccacgacgggcgttccttgcgcagctgtgctcgacgttgtcactgaagcgggaagggactggctgctattgggcgaagtgccggggcaggatctcctgtcatctcaccttgctcctgccgagaaagtatccatcatggctgatgcaatgcggcggctgcatacgcttgatccggctacctgcccattcgaccaccaagcgaaacatcgcatcgagcgagcacgtactcggatggaagccggtcttgtcgatcaggatgatctggacgaagagcatcaggggctcgcgccagccgaactgttcgccaggctcaaggcgcgcatgcccgacggcgaggatctcgtcgtgacccatggcgatgcctgcttgccgaatatcatggtggaaaatggccgcttttctggattcatcgactgtggccggctgggtgtggcggaccgctatcaggacatagcgttggctacccgtgatattgctgaagagcttggcggcgaatgggctgaccgcttcctcgtgctttacggtatcgccgctcccgattcgcagcgcatcgccttctatcgccttcttgacgagttcttctgagcgggactctggggttcgaaatgaccgaccaagcgacgcccaacctgccatcacgagatttcgattccaccgccgccttctatgaaaggttgggcttcggaatcgttttccgggacgccggctggatgatcctccagcgcggggatctcatgctggagttcttcgcccaccccaacttgtttattgcagcttataatggttacaaataaagcaatagcatcacaaatttcacaaataaagcatttttttcactgcattctagttgtggtttgtccaaactcatcaatgtatcttatcatgtctgtataccgtcgacctctagctagagcttggcgtaatcatggtcatagctgtttcctgtgtgaaattgttatccgctcacaattccacacaacatacgagccggaagcataaagtgtaaagcctggggtgcctaatgagtgagctaactcacattaattgcgttgcgctcactgcccgctttccagtcgggaaacctgtcgtgccagctgcattaatgaatcggccaacgcgcggggagaggcggtttgcgtattgggcgctcttccgcttcctcgctcactgactcgctgcgctcggtcgttcggctgcggcgagcggtatcagctcactcaaaggcggtaatacggttatccacagaatcaggggataacgcaggaaagaacatgtgagcaaaaggccagcaaaaggccaggaaccgtaaaaaggccgcgttgctggcgtttttccataggctccgcccccctgacgagcatcacaaaaatcgacgctcaagtcagaggtggcgaaacccgacaggactataaagataccaggcgtttccccctggaagctccctcgtgcgctctcctgttccgaccctgccgcttaccggatacctgtccgcctttctcccttcgggaagcgtggcgctttctcatagctcacgctgtaggtatctcagttcggtgtaggtcgttcgctccaagctgggctgtgtgcacgaaccccccgttcagcccgaccgctgcgccttatccggtaactatcgtcttgagtccaacccggtaagacacgacttatcgccactggcagcagccactggtaacaggattagcagagcgaggtatgtaggcggtgctacagagttcttgaagtggtggcctaactacggctacactagaagaacagtatttggtatctgcgctctgctgaagccagttaccttcggaaaaagagttggtagctcttgatccggcaaacaaaccaccgctggtagcggtggtttttttgtttgcaagcagcagattacgcgcagaaaaaaaggatctcaagaagatcctttgatcttttctacggggtctgacgctcagtggaacgaaaactcacgttaagggattttggtcatgagattatcaaaaaggatcttcacctagatccttttaaattaaaaatgaagttttaaatcaatctaaagtatatatgagtaaacttggtctgacagttaccaatgcttaatcagtgaggcacctatctcagcgatctgtctatttcgttcatccatagttgcctgactccccgtcgtgtagataactacgatacgggagggcttaccatctggccccagtgctgcaatgataccgcgagacccacgctcaccggctccagatttatcagcaataaaccagccagccggaagggccgagcgcagaagtggtcctgcaactttatccgcctccatccagtctattaattgttgccgggaagctagagtaagtagttcgccagttaatagtttgcgcaacgttgttgccattgctacaggcatcgtggtgtcacgctcgtcgtttggtatggcttcattcagctccggttcccaacgatcaaggcgagttacatgatcccccatgttgtgcaaaaaagcggttagctccttcggtcctccgatcgttgtcagaagtaagttggccgcagtgttatcactcatggttatggcagcactgcataattctcttactgtcatgccatccgtaagatgcttttctgtgactggtgagtactcaaccaagtcattctgagaatagtgtatgcggcgaccgagttgctcttgcccggcgtcaatacgggataataccgcgccacatagcagaactttaaaagtgctcatcattggaaaacgttcttcggggcgaaaactctcaaggatcttaccgctgttgagatccagttcgatgtaacccactcgtgcacccaactgatcttcagcatcttttactttcaccagcgtttctgggtgagcaaaaacaggaaggcaaaatgccgcaaaaaagggaataagggcgacacggaaatgttgaatactcatactcttcctttttcaatattattgaagcatttatcagggttattgtctcatgagcggatacatatttgaatgtatttagaaaaataaacaaataggggttccgcgcacatttccccgaaaagtgccacctgacgtc

SEQ ID NO: 2628 - protein, 518 aa, synthetic construct
MPKKKRKVYPYDVPDYAGSRALVVIRLSRVTDATTSPERQLESCQQLCAQRGWDVVGVAEDLDVSGAVDPFDRKRRPNLARWLAFEEQPFDVIVAYRVDRLTRSIRHLQQLVHWAEDHKKLVVSATEAHFDTTTPFAAVVIALMGTVAQMELEAIKERNRSAAHFNIRAGKYRGSLPPWGYLPTRVDGEWRLVPDPVQRERILEVYHRVVDNHEPLHLVAHDLNRRGVLSPKDYFAQLQGREPQGREWSATALKRSMISEAMLGYATLNGKTVRDDDGAPLVRAEPILTREQLEALRAELVKTSRAKPAVSTPSLLLRVLFCAVCGEPAYKFAGGGRKHPRYRCRSMGFPKHCGNGTVAMAEWDAFCEEQVLDLLGDAERLEKVWVAGSDSAVELAEVNAELVDLTSLIGSPAYRAGSPQREALDARIAALAARQEELEGLEARPSGWEWRETGQRFGDWWREQDTAAKNTWLRSMNVRLTFDVRGGLTRTIDFGDLQEYEQHLRLGSVVERLHTGMS

SEQ ID NO: 2629 - protein, 7 aa, Simian virus 40
PKKKRKV

SEQ ID NO: 2630 - DNA, 6246 bp, synthetic construct
  source 1..6246: mol_type = other DNA
atgtgagcaaaaggccagcaaaaggccaggaaccgtaaaaaggccgcgttgctggcgtttttccataggctccgcccccctgacgagcatcacaaaaatcgacgctcaagtcagaggtggcgaaacccgacaggactataaagataccaggcgtttccccctggaagctccctcgtgcgctctcctgttccgaccctgccgcttaccggatacctgtccgcctttctcccttcgggaagcgtggcgctttctcatagctcacgctgtaggtatctcagttcggtgtaggtcgttcgctccaagctgggctgtgtgcacgaaccccccgttcagcccgaccgctgcgccttatccggtaactatcgtcttgagtccaacccggtaagacacgacttatcgccactggcagcagccactggtaacaggattagcagagcgaggtatgtaggcggtgctacagagttcttgaagtggtggcctaactacggctacactagaagaacagtatttggtatctgcgctctgctgaagccagttaccttcggaaaaagagttggtagctcttgatccggcaaacaaaccaccgctggtagcggtggtttttttgtttgcaagcagcagattacgcgcagaaaaaaaggatctcaagaagatcctttgatcttttctacggggtctgacgctcagtggaacgaaaactcacgttaagggattttggtcatgagattatcaaaaaggatcttcacctagatccttttaaattaaaaatgaagttttaaatcaagcccaatctgaataatgttacaaccaattaaccaattctgattagaaaaactcatcgagcatcaaatgaaactgcaatttattcatatcaggattatcaataccatatttttgaaaaagccgtttctgtaatgaaggagaaaactcaccgaggcagttccataggatggcaagatcctggtatcggtctgcgattccgactcgtccaacatcaatacaacctattaatttcccctcgtcaaaaataaggttatcaagtgagaaatcaccatgagtgacgactgaatccggtgagaatggcaaaagtttatgcatttctttccagacttgttcaacaggccagccattacgctcgtcatcaaaatcactcgcatcaaccaaaccgttattcattcgtgattgcgcctgagcgagacgaaatacgcgatcgctgttaaaaggacaattacaaacaggaatcgaatgcaaccggcgcaggaacactgccagcgcatcaacaatattttcacctgaatcaggatattcttctaatacctggaatgctgtttttccggggatcgcagtggtgagtaaccatgcatcatcaggagtacggataaaatgcttgatggtcggaagaggcataaattccgtcagccagtttagtctgaccatctcatctgtaacatcattggcaacgctacctttgccatgtttcagaaacaactctggcgcatcgggcttcccatacaagcgatagattgtcgcacctgattgcccgacattatcgcgagcccatttatacccatataaatcagcatccatgttggaatttaatcgcggcctcgacgtttcccgttgaatatggctcataacaccccttgtattactgtttatgtaagcagacagttttattgttcatgatgatatatttttatcttgtgcaatgtaacatcagagattttgagacacgggccagagctgcatcgcgcgtttcggtgatgacggtgaaaacctctgacacatgcagctcccggagacggtcacagcttgtctgtaagcggatgccgggagcagacaagcccgtcagggcgcgtcagcgggtgttggcgggtgtcggggctggcttaactatgcggcatcagagcagattgtactgagagtgcaccatatgcggtgtgaaataccgcacagatgcgtaaggagaaaataccgcatcaggcgccattcgccattcaggctgcgcaactgttgggaagggcgatcggtgcgggcctcttcgctattacgccagctggcgaaagggggatgtgctgcaaggcgattaagttgggtaacgccagggttttcccagtcacgacgttgtaaaacgacggccagagaattcgagctcggtacctcgcgaatacatctagattaccgttcgtatagcatacattatacgaagttattaaactacgcctgcaaactttcactctcggtgtccatttatataagataaaacttaaataaacatccaccactctcccaaatacgcaggcgcacaagggggctccgcccccttaaacccccaagggggctccgcccccttaaacccccaagggggctccgcccccttacaccccctaataaatattcaacaggaaaaccacctaattagaattgccgaccacaaaccgtcacttacttctcctttttgcacttacttcctcttttacttattattattcattacattaattaataatcactgtaattccggggaggagctaacaatctatataactaactacacttccgaatggctgagtttatgccgccagacggagacgggatcacttcagtgactccaggctgaacttgggcgggagccgaaggtgagtgcaaccaccgtagtctaggggcaattcgggctagttcagtatggcggaacgggcaagaaacttaaatattattattttacagatggtgagaccgcggccgccacctctgacacatgcagctcccgcagacggtcacagcttgtctgtaagcggatgccgggagcagacaagcccgtcagggcgcgtcagcgggtgttggcgggtgtcggggctggcttaactatgcggcatcagagcagattgtactgagagtgcaccatatgcggtgtgaaataccgcacagatgcgtaaggagaaaataccgcatcaggcgccattcgccattcaggctgcgcaactgttgggaagggcgatcggtgcgggcctcttcgctattacgccagctggcgaaagggggatgtgctgcaaggcgattaagttgggtaacgccagggttttcccagtcacgacgttgtaaaacgacggccagtgaattcgagctcggtacccgaggatcctctagagtcgacctgcaggcatgcaacgatggcgtaatcatggtcatagctgtttcctgtgtgaaattgttatccgctcacaattcaacacaacatacgagccggaagcataaagtgtaaagcctggggtgcctaatgagtgagctaactcacattaattgcgttgcgctcactgcccgctttccagtcgggaaacctgtcgtgccagctgcattaatgaatcggccaacgcgcggggagaggcggtttgcgtattaagcttggtctcatgaaataacttcgtatagcatacattatacgaacggtaatcggatcccgggcccgtcgactgcagaggcgatgtacgggccagatatacgcgttgacattgattattgactagttattaatagtaatcaattacggggtcattagttcatagcccatatatggagttccgcgttacataacttacggtaaatggcccgcctggctgaccgcccaacgacccccgcccattgacgtcaataatgacgtatgttcccatagtaacgccaatagggactttccattgacgtcaatgggtggagtatttacggtaaactgcccacttggcagtacatcaagtgtatcatatgccaagtacgccccctattgacgtcaatgacggtaaatggcccgcctggcattatgcccagtacatgaccttatgggactttcctacttggcagtacatctacgtattagtcatcgctattaccatggtgatgcggttttggcagtacatcaatgggcgtggatagcggtttgactcacggggatttccaagtctccaccccattgacgtcaatgggagtttgttttggcaccaaaatcaacgggactttccaaaatgtcgtaacaactccgccccattgacgcaaatgggcggtaggcgtgtacggtgggaggtctatataagcagagctctctggctaactagagaacccactgcttactggcttatcgaaattaatacgactcactataggcaagctggctagcgtttaaacttaagcttacaccatggtgcccaagaagaagaggaaagtctccaacctgctgactgtgcaccaaaacctgcctgccctccctgtggatgccacctctgatgaagtcaggaagaacctgatggacatgttcagggacaggcaggccttctctgaacacacctggaagatgctcctgtctgtgtgcagatcctgggctgcctggtgcaagctgaacaacaggaaatggttccctgctgaacctgaggatgtgagggactacctcctgtacctgcaagtaagtatcaaggttacaagacaggtttaaggagaccaatagaaactgggcttgtcgagacagagaagactcttgcgtttctgataggcacctattggtcttactgacatccactttgcctttctctccacaggccagaggcctggctgtgaaaaccatccaacagcacctgggccagctcaacatgctgcacaggagatctggcctgcctcgcccttctgactccaatgctgtgtccctggtgatgaggagaatcagaaaggagaatgtggatgctggggagagagccaagcaggccctggcctttgaacgcactgactttgaccaagtcagatccctgatggagaactctgacagatgccaggacatcaggaacctggccttcctgggcattgcctacaacaccctgctgcgcattgccgaaattgccagaatcagagtgaaggacatctcccgcaccgatggtgggagaatgctgatccacattggcaggaccaagaccctggtgtccacagctggtgtggagaaggccctgtccctgggggttaccaagctggtggagagatggatctctgtgtctggtgtggctgatgaccccaacaactacctgttctgccgggtcagaaagaatggtgtggctgccccttctgccacctcccaactgtccacccgcgccctggaagggatctttgaggccacccaccgcctgatctatggtgccaaggatgactctgggcagagatacctggcctggtctggccactctgccagagtgggtgctgccagggacatggccagggctggtgtgtccatccctgaaatcatgcaggctggtggctggaccaatgtgaacatagtgatgaactacatcagaaacctggactctgagactggggccatggtgaggctgctcgaggatggggactgataatggatccactagtccagtgtggtggaattctgcagatatccagcacagtggcggccgctcgagtctagagggcccgtttaaacccgctgatcagcctcgactgtgccttctagttgccagccatctgttgtttgcccctcccccgtgccttccttgaccctggaaggtgccactcccactgtcctttcctaataaaatgaggaaattgcatcgcattgtctgagtaggtgtcattctattctggggggtggggtggggcaggacagcaagggggaggattgggaagacaatagcaggcatgctggggatgcggtgggctctatggcttctgaggcggaaagaaccagctggggctctagggggtatccccacgcgccctgtagcggcgcattaagcgcggcgggtgtggtggttacgcgcagcgtgaccgctacacttgccagcgccctagcgcccgctcctttcgctttcttcccttcctttctcgccacgttcgcccctgcatgcaagcttggtgtaatcatggtcatagctgtttcctgtgtgaaattgttatccgctcacaattccacacaacatacgagccggaagcataaagtgtaaagcctggggtgcctaatgagtgagctaactcacattaattgcgttgcgctcactgcccgctttccagtcgggaaacctgtcgtgccagctgcattaatgaatcggccaacgcgcggggagaggcggtttgcgtattgggcgctcttccgcttcctcgctcactgactcgctgcgctcggtcgttcggctgcggcgagcggtatcagctcactcaaaggcggtaatacggttatccacagaatcaggggataacgcaggaaagaac

SEQ ID NO: 2631 - DNA, 1236 bp, synthetic construct
  source 1..1236: mol_type = other DNA
atccaccactctcccaaatacgcaggcgcacaagggggctccgcccccttaaacccccaagggggctccgcccccttaaacccccaagggggctccgcccccttacaccccctaataaatattcaacaggaaaaccacctaattagaattgccgaccacaaaccgtcacttacttctcctttttgcacttacttcctcttttacttattattattcattacattaattaataatcactgtaattccggggaggagctaacaatctatataactaactacacttccgaatggctgagtttatgccgccagacggagacgggatcacttcagtgactccaggctgaacttgggcgggagccgaaggtgagtgcaaccaccgtagtctaggggcaattcgggctagttcagtatggcggaacgggcaagaaacttaaatattattattttacagatggtgagaccgcggccgccacctctgacacatgcagctcccgcagacggtcacagcttgtctgtaagcggatgccgggagcagacaagcccgtcagggcgcgtcagcgggtgttggcgggtgtcggggctggcttaactatgcggcatcagagcagattgtactgagagtgcaccatatgcggtgtgaaataccgcacagatgcgtaaggagaaaataccgcatcaggcgccattcgccattcaggctgcgcaactgttgggaagggcgatcggtgcgggcctcttcgctattacgccagctggcgaaagggggatgtgctgcaaggcgattaagttgggtaacgccagggttttcccagtcacgacgttgtaaaacgacggccagtgaattcgagctcggtacccgaggatcctctagagtcgacctgcaggcatgcaacgatggcgtaatcatggtcatagctgtttcctgtgtgaaattgttatccgctcacaattcaacacaacatacgagccggaagcataaagtgtaaagcctggggtgcctaatgagtgagctaactcacattaattgcgttgcgctcactgcccgctttccagtcgggaaacctgtcgtgccagctgcattaatgaatcggccaacgcgcggggagaggcggtttgcgtattaagcttggtctcatgaaataacttcgtatagcatacattatacgaagttattaaactacgcctgcaaactttcactctcggtgtccatttatataagataaaacttaaataaac

SEQ ID NO: 2632 - DNA, 6674 bp, synthetic construct
  source 1..6674: mol_type = other DNA
caattgctttccagtcgggaaacctgtcgtgccagctgcattaatgaatcggccaacgcgcggggagaggcggtttgcgtattgggcgctcttccgcttcctcgctcactgactcgctgcgctcggtcgttcggctgcggcgagcggtatcagctcactcaaaggcggtaatacggttatccacagaatcaggggataacgcaggaaagaacatgtgagcaaaaggccagcaaaaggccaggaaccgtaaaaaggccgcgttgctggcgtttttccataggctccgcccccctgacgagcatcacaaaaatcgacgctcaagtcagaggtggcgaaacccgacaggactataaagataccaggcgtttccccctggaagctccctcgtgcgctctcctgttccgaccctgccgcttaccggatacctgtccgcctttctcccttcgggaagcgtggcgctttctcatagctcacgctgtaggtatctcagttcggtgtaggtcgttcgctccaagctgggctgtgtgcacgaaccccccgttcagcccgaccgctgcgccttatccggtaactatcgtcttgagtccaacccggtaagacacgacttatcgccactggcagcagccactggtaacaggattagcagagcgaggtatgtaggcggtgctacagagttcttgaagtggtggcctaactacggctacactagaaggacagtatttggtatctgcgctctgctgaagccagttaccttcggaaaaagagttggtagctcttgatccggcaaacaaaccaccgctggtagcggtggtttttttgtttgcaagcagcagattacgcgcagaaaaaaaggatctcaagaagatcctttgatcttttctacggggtctgacgctcagtggaacgaaaactcacgttaagggattttggtcatgagattatcaaaaaggatcttcacctagatccttttaaattaaaaatgaagttttaaatcaatctaaagtatatatgagtaaacttggtctgacagttagaaaaactcatcgagcatcaaatgaaactgcaatttattcatatcaggattatcaataccatatttttgaaaaagccgtttctgtaatgaaggagaaaactcaccgaggcagttccataggatggcaagatcctggtatcggtctgcgattccgactcgtccaacatcaatacaacctattaatttcccctcgtcaaaaataaggttatcaagtgagaaatcaccatgagtgacgactgaatccggtgagaatggcaaaagtttatgcatttctttccagacttgttcaacaggccagccattacgctcgtcatcaaaatcactcgcatcaaccaaaccgttattcattcgtgattgcgcctgagcgagacgaaatacgcgatcgctgttaaaaggacaattacaaacaggaatcgaatgcaaccggcgcaggaacactgccagcgcatcaacaatattttcacctgaatcaggatattcttctaatacctggaatgctgtttttccggggatcgcagtggtgagtaaccatgcatcatcaggagtacggataaaatgcttgatggtcggaagaggcataaattccgtcagccagtttagtctgaccatctcatctgtaacatcattggcaacgctacctttgccatgtttcagaaacaactctggcgcatcgggcttcccatacaagcgatagattgtcgcacctgattgcccgacattatcgcgagcccatttatacccatataaatcagcatccatgttggaatttaatcgcggcctcgacgtttcccgttgaatatggctcataacaccccttgtattactgtttatgtaagcagacagttttattgttcatgatgatatatttttatcttgtgcaatgtaacatcagagattttgagacacgggccagagctgcacacatttccccgaaaagtgccacctgacgtctaagaaaccattattatcatgacattaacctataaaaataggcgtatcacgaggccgcccctgcagccgaattatattatttttgccaaataatttttaacaaaagctctgaagtcttcttcatttaaattcttagatgatacttcatctggaaaattgtcccaattagtagcatcacgctgtgagtaagttctaaaccatttttttattgttgtattatctctaatcttactactcgatgagttttcggtattatctctatttttaacttggagcaggttccattcattgtttttttcatcatagtgaataaaatcaactgctttaacacttgtgcctgaacaccatatccatccggcgtaatacgactcactatagggagagcggccgccagatcttccggatggctcgagtttttcagcaagattaccgttcgtatagcatacattatacgaagttataggccagcattaattcacttaaggagtctgtttatttaagttaaaccttaataaacggtcaccgcctccctaatacgcaggcgcagaaagggggctccgccccctttaacccccagggggctccgccccctgaaacccccaagggggctacgcccccttacaccccctaataaatattcaacaggaaaaccacctaatttaaattgccgaccacaaaccgtcacttagttcccctttttgcaacaacttctgcttttttccaactgccggaaaaccacataatttgcatggctaaccacaaactgatatgctaattaacttccacaaaacaacttccccttttaaaaccacacctacaaattaattattaaacacagtcacatcctgggaggtactaccacactataataccaagtgcacttccgaatggctgagtttatgccgctagacggagaacgcatcagttactgactgcggactgaacttgggcgggtgccgaaggtgagtgaaaccaccgaagtcaaggggcaattcgggctagttcagtctagcggaacgggcaagaaacttaaaattattttatttttcagatggtgagaccgcggccgccacctctgacacatgcagctcccgcagacggtcacagcttgtctgtaagcggatgccgggagcagacaagcccgtcagggcgcgtcagcgggtgttggcgggtgtcggggctggcttaactatgcggcatcagagcagattgtactgagagtgcaccatatgcggtgtgaaataccgcacagatgcgtaaggagaaaataccgcatcaggcgccattcgccattcaggctgcgcaactgttgggaagggcgatcggtgcgggcctcttcgctattacgccagctggcgaaagggggatgtgctgcaaggcgattaagttgggtaacgccagggttttcccagtcacgacgttgtaaaacgacggccagtgaattcgagctcggtacccgaggatcctctagagtcgacctgcaggcatgcaacgatggcgtaatcatggtcatagctgtttcctgtgtgaaattgttatccgctcacaattcaacacaacatacgagccggaagcataaagtgtaaagcctggggtgcctaatgagtgagctaactcacattaattgcgttgcgctcactgcccgctttccagtcgggaaacctgtcgtgccagctgcattaatgaatcggccaacgcgcggggagaggcggtttgcgtattaagcttggtctcatgaaataacttcgtatagcatacattatacgaacggtaatctttctagaagatctcctacaatattctcagctgccatggaaaatcgatgttcttcttttattctctcaagattttcaggctgtatattaaaacttatattaagaactatgctaaccacctcatcaggaaccgttgtaggtggcgtgggttttcttggcaatcgactctcatgaaaactacgagctaaatattcaatatgttcctcttgaccaactttattctgcattttttttgaacgaggtttagagcaagcttcaggaaactgagacaggaattttattaaaaatttaaattttgaagaaagttcagggttaatagcatccattttttgctttgcaagttcctcagcattcttaacaaaagacgtctcttttgacatgtttaaagtttcgatgtacgggccagatatacgcgttgacattgattattgactagttattaatagtaatcaattacggggtcattagttcatagcccatatatggagttccgcgttacataacttacggtaaatggcccgcctggctgaccgcccaacgacccccgcccattgacgtcaataatgacgtatgttcccatagtaacgccaatagggactttccattgacgtcaatgggtggagtatttacggtaaactgcccacttggcagtacatcaagtgtatcatatgccaagtacgccccctattgacgtcaatgacggtaaatggcccgcctggcattatgcccagtacatgaccttatgggactttcctacttggcagtacatctacgtattagtcatcgctattaccatggtgatgcggttttggcagtacatcaatgggcgtggatagcggtttgactcacggggatttccaagtctccaccccattgacgtcaatgggagtttgttttggcaccaaaatcaacgggactttccaaaatgtcgtaacaactccgccccattgacgcaaatgggcggtaggcgtgtacggtgggaggtctatataagcagagctctctggctaactagagaacccactgcttactggcttatcgaaattaatacgactcactataggcaagctggctagcgtttaaacttaagcttacaccatggtgcccaagaagaagaggaaagtctccaacctgctgactgtgcaccaaaacctgcctgccctccctgtggatgccacctctgatgaagtcaggaagaacctgatggacatgttcagggacaggcaggccttctctgaacacacctggaagatgctcctgtctgtgtgcagatcctgggctgcctggtgcaagctgaacaacaggaaatggttccctgctgaacctgaggatgtgagggactacctcctgtacctgcaagtaagtatcaaggttacaagacaggtttaaggagaccaatagaaactgggcttgtcgagacagagaagactcttgcgtttctgataggcacctattggtcttactgacatccactttgcctttctctccacaggccagaggcctggctgtgaaaaccatccaacagcacctgggccagctcaacatgctgcacaggagatctggcctgcctcgcccttctgactccaatgctgtgtccctggtgatgaggagaatcagaaaggagaatgtggatgctggggagagagccaagcaggccctggcctttgaacgcactgactttgaccaagtcagatccctgatggagaactctgacagatgccaggacatcaggaacctggccttcctgggcattgcctacaacaccctgctgcgcattgccgaaattgccagaatcagagtgaaggacatctcccgcaccgatggtgggagaatgctgatccacattggcaggaccaagaccctggtgtccacagctggtgtggagaaggccctgtccctgggggttaccaagctggtggagagatggatctctgtgtctggtgtggctgatgaccccaacaactacctgttctgccgggtcagaaagaatggtgtggctgccccttctgccacctcccaactgtccacccgcgccctggaagggatctttgaggccacccaccgcctgatctatggtgccaaggatgactctgggcagagatacctggcctggtctggccactctgccagagtgggtgctgccagggacatggccagggctggtgtgtccatccctgaaatcatgcaggctggtggctggaccaatgtgaacatagtgatgaactacatcagaaacctggactctgagactggggccatggtgaggctgctcgaggatggggactgataatggatccactagtccagtgtggtggaattctgcagatatccagcacagtggcggccgctcgagtctagagggcccgtttaaacccgctgatcagcctcgactgtgccttctagttgccagccatctgttgtttgcccctcccccgtgccttccttgaccctggaaggtgccactcccactgtcctttcctaataaaatgaggaaattgcatcgcattgtctgagtaggtgtcattctattctggggggtggggtggggcaggacagcaagggggaggattgggaagacaatagcaggcatgctggggatgcggtgggctctatggcttctgaggcggaaagaaccagctggggctctagggggtatccccacgcgccctgtagcggcgcattaagcgcggcgggtgtggtggttacgcgcagcgtgaccgctacacttgccagcgccctagcgcccgctcctttcgctttcttcccttcctttctcgccacgttcgccaaacctcctgtgtgaaattattatccgctcataattccacacattatacgagccggaagcataaagtgtaaagcctggggtgcctaatgagtgagctaactcacattaattgcgttgcgctcactgc

SEQ ID NO: 2633 - DNA, 1312 bp, synthetic construct
  source 1..1312: mol_type = other DNA
aggccagcattaattcacttaaggagtctgtttatttaagttaaaccttaataaacggtcaccgcctccctaatacgcaggcgcagaaagggggctccgccccctttaacccccagggggctccgccccctgaaacccccaagggggctacgcccccttacaccccctaataaatattcaacaggaaaaccacctaatttaaattgccgaccacaaaccgtcacttagttcccctttttgcaacaacttctgcttttttccaactgccggaaaaccacataatttgcatggctaaccacaaactgatatgctaattaacttccacaaaacaacttccccttttaaaaccacacctacaaattaattattaaacacagtcacatcctgggaggtactaccacactataataccaagtgcacttccgaatggctgagtttatgccgctagacggagaacgcatcagttactgactgcggactgaacttgggcgggtgccgaaggtgagtgaaaccaccgaagtcaaggggcaattcgggctagttcagtctagcggaacgggcaagaaacttaaaattattttatttttcagatggtgagaccgcggccgccacctctgacacatgcagctcccgcagacggtcacagcttgtctgtaagcggatgccgggagcagacaagcccgtcagggcgcgtcagcgggtgttggcgggtgtcggggctggcttaactatgcggcatcagagcagattgtactgagagtgcaccatatgcggtgtgaaataccgcacagatgcgtaaggagaaaataccgcatcaggcgccattcgccattcaggctgcgcaactgttgggaagggcgatcggtgcgggcctcttcgctattacgccagctggcgaaagggggatgtgctgcaaggcgattaagttgggtaacgccagggttttcccagtcacgacgttgtaaaacgacggccagtgaattcgagctcggtacccgaggatcctctagagtcgacctgcaggcatgcaacgatggcgtaatcatggtcatagctgtttcctgtgtgaaattgttatccgctcacaattcaacacaacatacgagccggaagcataaagtgtaaagcctggggtgcctaatgagtgagctaactcacattaattgcgttgcgctcactgcccgctttccagtcgggaaacctgtcgtgccagctgcattaatgaatcggccaacgcgcggggagaggcggtttgcgtattaagcttggtctcatgaaataacttcgtatagcatacattatacgaagttat

SEQ ID NO: 2634 - DNA, 8345 bp, synthetic construct
  source 1..8345: mol_type = other DNA
tttccataggctccgcccccctgacgagcatcacaaaaatcgacgctcaagtcagaggtggcgaaacccgacaggactataaagataccaggcgtttccccctggaagctccctcgtgcgctctcctgttccgaccctgccgcttaccggatacctgtccgcctttctcccttcgggaagcgtggcgctttctcatagctcacgctgtaggtatctcagttcggtgtaggtcgttcgctccaagctgggctgtgtgcacgaaccccccgttcagcccgaccgctgcgccttatccggtaactatcgtcttgagtccaacccggtaagacacgacttatcgccactggcagcagccactggtaacaggattagcagagcgaggtatgtaggcggtgctacagagttcttgaagtggtggcctaactacggctacactagaagaacagtatttggtatctgcgctctgctgaagccagttaccttcggaaaaagagttggtagctcttgatccggcaaacaaaccaccgctggtagcggtggtttttttgtttgcaagcagcagattacgcgcagaaaaaaaggatctcaagaagatcctttgatcttttctacggggtctgacgctcagtggaacgaaaactcacgttaagggattttggtcatgagattatcaaaaaggatcttcacctagatccttttaaattaaaaatgaagttttaaatcaagcccaatctgaataatgttacaaccaattaaccaattctgattagaaaaactcatcgagcatcaaatgaaactgcaatttattcatatcaggattatcaataccatatttttgaaaaagccgtttctgtaatgaaggagaaaactcaccgaggcagttccataggatggcaagatcctggtatcggtctgcgattccgactcgtccaacatcaatacaacctattaatttcccctcgtcaaaaataaggttatcaagtgagaaatcaccatgagtgacgactgaatccggtgagaatggcaaaagtttatgcatttctttccagacttgttcaacaggccagccattacgctcgtcatcaaaatcactcgcatcaaccaaaccgttattcattcgtgattgcgcctgagcaagacgaaatacgcgatcgctgttaaaaggacaattacaaacaggaatcgaatgcaaccggcgcaggaacactgccagcgcatcaacaatattttcacctgaatcaggatattcttctaatacctggaatgctgtttttccggggatcgcagtggtgagtaaccatgcatcatcaggagtacggataaaatgcttgatggtcggaagaggcataaattccgtcagccagtttagtctgaccatctcatctgtaacatcattggcaacgctacctttgccatgtttcagaaacaactctggcgcatcgggcttcccatacaagcgatagattgtcgcacctgattgcccgacattatcgcgagcccatttatacccatataaatcagcatccatgttggaatttaatcgcggcctcgacgtttcccgttgaatatggctcataacaccccttgtattactgtttatgtaagcagacagttttattgttcatgatgatatatttttatcttgtgcaatgtaacatcagagattttgagacacgggccagagctggcgtttcggtgatgacggtgaaaacctctgacacatgcagctcccgaagacggtcacagcttgtctgtaagcggatgccgggagcagacaagcccgtcagggcgcgtcagcgggtgttggcgggtgtcggggctggcttaactatgcggcatcagagcagattgtactgagagtgcaccatatgcggtgtgaaataccgcacagatgcgtaaggagaaaataccgcatcaggcgccattcgccattcaggctgcgcaactgttgggaagggcgatcggtgcgggcctcttcgctattacgccagctggcgaaagggggatgtgctgcaaggcgattaagttgggtaacgccagggttttcccagtcacgacgttgtaaaacgacggccagagaattcgagctcggtacctcgcgaatacatctagatatctcggccggcttgtcgacgacggcggtctccgtcgtcaggatcatccgggctaaactacgcctgcaaactttcactctcggtgtccatttatataagataaaacttaaataaacatccaccactctcccaaatacgcaggcgcacaagggggctccgcccccttaaacccccaagggggctccgcccccttaaacccccaagggggctccgcccccttacaccccctaataaatattcaacaggaaaaccacctaattagaattgccgaccacaaaccgtcacttacttctcctttttgcacttacttcctcttttacttattattattcattacattaattaataatcactgtaattccggggaggagctaacaatctatataactaactacacttccgaatggctgagtttatgccgccagacggtgacgggatcacttcagtgactccaggctgaacttgggcgggagccgaaggtgagtgcaaccaccgtagtctaggggcaattcgggctagttcagtatggcggaacgggcaagaaacttaaatattattattttacagcggtatgggcgttgacattgattattgactagttattaatagtaatcaattacggggtcattagttcatagcccatatatggagttccgcgttacataacttacggtaaatggcccgcctggctgaccgcccaacgacccccgcccattgacgtcaataatgacgtatgttcccatagtaacgccaatagggactttccattgacgtcaatgggtggagtatttacggtaaactgcccacttggcagtacatcaagtgtatcatatgccaagtacgccccctattgacgtcaatgacggtaaatggcccgcctggcattatgcccagtacatgaccttatgggactttcctacttggcagtacatctacgtattagtcatcgctattaccatggtgatgcggttttggcagtacatcaatgggcgtggatagcggtttgactcacggggatttccaagtctccaccccattgacgtcaatgggagtttgttttggcaccaaaatcaacgggactttccaaaatgtcgtaacaactccgccccattgacgcaaatgggcggtaggcgtgtacggtgggaggtctatataagcagagctctctggctaactggatctacaaaaaagcagatccaccggtcgccaccatggtgagcaagggcgaggagctgttcaccggggtggtgcccatcctggtcgagctggacggcgacgtaaacggccacaagttcagcgtgtccggcgagggcgagggcgatgccacctacggcaagctgaccctgaagttcatctgcaccaccggcaagctgcccgtgccctggcccaccctcgtgaccaccctgacctacggcgtgcagtgcttcagccgctaccccgaccacatgaagcagcacgacttcttcaagtccgccatgcccgaaggctacgtccaggagcgcaccatcttcttcaaggacgacggcaactacaagacccgcgccgaggtgaagttcgagggcgacaccctggtgaaccgcatcgagctgaagggcatcgacttcaaggaggacggcaacatcctggggcacaagctggagtacaactacaacagccacaacgtctatatcatggccgacaagcagaagaacggcatcaaggtgaacttcaagatccgccacaacatcgaggacggcagcgtgcagctcgccgaccactaccagcagaacacccccatcggcgacggccccgtgctgctgcccgacaaccactacctgagcacccagtccgccctgagcaaagaccccaacgagaagcgcgatcacatggtcctgctggagttcgtgaccgccgccgggatcactctcggcatggacgagctgtacaagtaataaaatcaacctctggattacaaaatttgtgaaagattgactggtattcttaactatgttgctccttttacgctatgtggatacgctgctttaatgcctttgtatcatgctattgcttcccgtatggctttcattttctcctccttgtataaatcctggttgctgtctctttatgaggagttgtggcccgttgtcaggcaacgtggcgtggtgtgcactgtgtttgctgacgcaacccccactggttggggcattgccaccacctgtcagctcctttccgggactttcgctttccccctccctattgccacggcggaactcatcgccgcctgccttgcccgctgctggacaggggctcggctgttgggcactgacaattccgtggtgttgtcggggaagctgacgtcctttccatggctgctcgcctgtgttgccacctggattctgcgcgggacgtccttctgctacgtcccttcggccctcaatccagcggaccttccttcccgcggcctgctgccggctctgcggcctcttccgcgtcttcgccttcgccctcagacgagtcggatctccctttgggccgcctccccgcctggttccgactgtgccttctagttgccagccatctgttgtttgcccctcccccgtgccttccttgaccctggaaggtgccactcccactgtcctttcctaataaaatgaggaaattgcatcgcattgtctgagtaggtgtcattctattctggggggtggggtggggcaggacagcaagggggaggattgggtagacaatagcaggcatgctggggatgcggtgggctctatggtcgagttagtttgctccagtaaagttgtttataataactactaaatccgcatgttacggaatttcttattaatttttttttcgtaaggaacaacggatcttgaatctggtcgtggtttgtctggtcaaccaccgcggtctcagtggtgtacggtacaaaccccgacgatatcggatcccgggcccgtcgactgcagaggcgatgtacgggccagatatacgcgttgacattgattattgactagttattaatagtaatcaattacggggtcattagttcatagcccatatatggagttccgcgttacataacttacggtaaatggcccgcctggctgaccgcccaacgacccccgcccattgacgtcaataatgacgtatgttcccatagtaacgccaatagggactttccattgacgtcaatgggtggagtatttacggtaaactgcccacttggcagtacatcaagtgtatcatatgccaagtacgccccctattgacgtcaatgacggtaaatggcccgcctggcattatgcccagtacatgaccttatgggactttcctacttggcagtacatctacgtattagtcatcgctattaccatggtgatgcggttttggcagtacatcaatgggcgtggatagcggtttgactcacggggatttccaagtctccaccccattgacgtcaatgggagtttgttttggcaccaaaatcaacgggactttccaaaatgtcgtaacaactccgccccattgacgcaaatgggcggtaggcgtgtacggtgggaggtctatataagcagagctctctggctaactagagaacccactgcttactggcttatcgaaattaatacgactcactatagggagacccaagctggctagcgtttaaacttaagcttgccaccatgccaaaaaagaaaagaaaagtgtatccctatgatgtccccgattatgccggttcaagagccctggtcgtgattagactgagccgagtgacagacgccaccacaagtcccgagagacagctggaatcatgccagcagctctgtgctcagcggggttgggatgtggtcggcgtggcagaggatctggacgtgagcggggccgtcgatccattcgacagaaagaggaggcccaacctggcaagatggctcgctttcgaggaagtaagtatcaaggttacaagacaggtttaaggagaccaatagaaactgggcttgtcgagacagagaagactcttgcgtttctgataggcacctattggtcttactgacatccactttgcctttctctccacagcagccctttgatgtgatcgtcgcctacagagtggaccggctgacccgctcaattcgacatctccagcagctggtgcattgggctgaggaccacaagaaactggtggtcagcgcaacagaagcccacttcgatactaccacaccttttgccgctgtggtcatagcactgatgggcactgtggcccagatggagctcgaagctatcaaggagcgaaacaggagcgcagcccatttcaatattagggccggtaaatacagaggctccctgcccccttggggatatctccctaccagggtggatggggagtggagactggtgccagaccccgtccagagagagcggattctggaagtgtaccacagagtggtcgataaccacgaaccactccatctggtggcacacgacctgaatagacgcggcgtgctctctccaaaggattattttgctcagctgcagggaagagagccacagggaagagaatggagtgctactgcactgaagagatctatgatcagtgaggctatgctgggttacgcaacactcaatggcaaaactgtccgggacgatgacggagcccctctggtgagggctgagcctattctcaccagagagcagctcgaagctctgcgggcagaactggtcaagactagtcgcgccaaaccggccgtgagcaccccaagcctgctcctgagggtgctgttctgcgccgtctgtggagagccagcatacaagtttgccggcggagggcgcaaacatccccgctatcgatgcaggagcatggggttccctaagcactgtggaaacgggacagtggccatggctgagtgggacgccttttgcgaggaacaggtgctggatctcctgggtgacgctgagcggctggaaaaagtgtgggtggcaggatctgactccgctgtggagctggcagaagtcaatgccgagctcgtggatctgacttccctcatcggatctcctgcatatagagctgggtccccacagagagaagctctggacgcacgaattgctgcactcgctgctagacaggaggaactggagggcctggaggccaggccctctggatgggagtggcgagaaaccggacagaggtttggggattggtggagggagcaggacaccgcagccaagaacacatggctgagatccatgaatgtccggctcacattcgacgtgcgcggtggcctgactcgaaccatcgattttggcgacctccaggagtatgaacagcacctgagactggggtccgtggtcgaaagactgcacactgggatgtcctaaggatccactagtccagtgtggtggaattctgcagatatccagcacagtggcggccgctcgagtctagagggcccgtttaaacccgctgatcagcctcgactgtgccttctagttgccagccatctgttgtttgcccctcccccgtgccttccttgaccctggaaggtgccactcccactgtcctttcctaataaaatgaggaaattgcatcgcattgtctgagtaggtgtcattctattctggggggtggggtggggcaggacagcaagggggaggattgggaagacaatagcaggcatgctggggatgcggtgggctctatggcttctgaggcggaaagaaccagctggggctctagggggtatccccacgcgccctgtagcggcgcattaagcgcggcgggtgtggtggttacgcgcagcgtgaccgctacacttgccacctgcatgcaagcttggtgtaatcatggtcatagctgtttcctgtgtgaaattgttatccgctcacaattccacacaacatacgagccggaagcataaagtgtaaagcctggggtgcctaatgagtgagctaactcacattaattgcgttgcgctcactgcccgctttccagtcgggaaacctgtcgtgccagctgcattaatgaatcggccaacgcgcggggagaggcggtttgcgtattgggcgctcttccgcttcctcgctcactgactcgctgcgctcggtcgttcggctgcggcgagcggtatcagctcactcaaaggcggtaatacggttatccacagaatcaggggataacgcaggaaagaacatgtgagcaaaaggccagcaaaaggccaggaaccgtaaaaaggccgcgttgctggcgtt

SEQ ID NO: 2635 - protein, 269 aa, synthetic construct
MSHIQRETSRPRLNSNMDADLYGYKWARDNVGQSGATIYRLYGKPDAPELFLKHGKGSVANDVTDEMVRLNWLTEFMPLPTIKHFIRTPDDAWLLTTAIPGKTAFQVLEEYPDSGENIVDALAVFLRRLHSIPVCNCPFNSDRVFRLAQAQSRMNNGLVDASDFDDERNGWPVEQVWKEMHKLLPFSPDSVVTHGDFSLDNLIFDEGKLIGCIDVGRVGIADRYQDLAILWNCLGEFSPSLQKRLFQKYGIDNPDMNKLQFHLMLDEFF

SEQ ID NO: 2636 - DNA, 2867 bp, synthetic construct; identical to SEQ ID NO: 2624
  source 1..2867: mol_type = other DNA

SEQ ID NO: 2637 - DNA, 8421 bp, synthetic construct
  source 1..8421: mol_type = other DNA
gcgtttcggtgatgacggtgaaaacctctgacacatgcagctcccgaagacggtcacagcttgtctgtaagcggatgccgggagcagacaagcccgtcagggcgcgtcagcgggtgttggcgggtgtcggggctggcttaactatgcggcatcagagcagattgtactgagagtgcaccatatgcggtgtgaaataccgcacagatgcgtaaggagaaaataccgcatcaggcgccattcgccattcaggctgcgcaactgttgggaagggcgatcggtgcgggcctcttcgctattacgccagctggcgaaagggggatgtgctgcaaggcgattaagttgggtaacgccagggttttcccagtcacgacgttgtaaaacgacggccagagaattcgagctcggtacctcgcgaatacatctagatatctcggccggcttgtcgacgacggcggtctccgtcgtcaggatcatccgggcaggccagcattaattcacttaaggagtctgtttatttaagttaaaccttaataaacggtcaccgcctccctaatacgcaggcgcagaaagggggctccgccccctttaacccccagggggctccgccccctgaaacccccaagggggctacgcccccttacaccccctaataaatattcaacaggaaaaccacctaatttaaattgccgaccacaaaccgtcacttagttcccctttttgcaacaacttctgcttttttccaactgccggaaaaccacataatttgcatggctaaccacaaactgatatgctaattaacttccacaaaacaacttccccttttaaaaccacacctacaaattaattattaaacacagtcacatcctgggaggtactaccacactataataccaagtgcacttccgaatggctgagtttatgccgctagacggagaacgcatcagttactgactgcggactgaacttgggcgggtgccgaaggtgagtgaaaccaccgaagtcaaggggcaattcgggctagttcagtctagcggaacgggcaagaaacttaaaattattttatttttcagcggtatgggcgttgacattgattattgactagttattaatagtaatcaattacggggtcattagttcatagcccatatatggagttccgcgttacataacttacggtaaatggcccgcctggctgaccgcccaacgacccccgcccattgacgtcaataatgacgtatgttcccatagtaacgccaatagggactttccattgacgtcaatgggtggagtatttacggtaaactgcccacttggcagtacatcaagtgtatcatatgccaagtacgccccctattgacgtcaatgacggtaaatggcccgcctggcattatgcccagtacatgaccttatgggactttcctacttggcagtacatctacgtattagtcatcgctattaccatggtgatgcggttttggcagtacatcaatgggcgtggatagcggtttgactcacggggatttccaagtctccaccccattgacgtcaatgggagtttgttttggcaccaaaatcaacgggactttccaaaatgtcgtaacaactccgccccattgacgcaaatgggcggtaggcgtgtacggtgggaggtctatataagcagagctctctggctaactggatctacaaaaaagcagatccaccggtcgccaccatggtgagcaagggcgaggagctgttcaccggggtggtgcccatcctggtcgagctggacggcgacgtaaacggccacaagttcagcgtgtccggcgagggcgagggcgatgccacctacggcaagctgaccctgaagttcatctgcaccaccggcaagctgcccgtgccctggcccaccctcgtgaccaccctgacctacggcgtgcagtgcttcagccgctaccccgaccacatgaagcagcacgacttcttcaagtccgccatgcccgaaggctacgtccaggagcgcaccatcttcttcaaggacgacggcaactacaagacccgcgccgaggtgaagttcgagggcgacaccctggtgaaccgcatcgagctgaagggcatcgacttcaaggaggacggcaacatcctggggcacaagctggagtacaactacaacagccacaacgtctatatcatggccgacaagcagaagaacggcatcaaggtgaacttcaagatccgccacaacatcgaggacggcagcgtgcagctcgccgaccactaccagcagaacacccccatcggcgacggccccgtgctgctgcccgacaaccactacctgagcacccagtccgccctgagcaaagaccccaacgagaagcgcgatcacatggtcctgctggagttcgtgaccgccgccgggatcactctcggcatggacgagctgtacaagtaataaaatcaacctctggattacaaaatttgtgaaagattgactggtattcttaactatgttgctccttttacgctatgtggatacgctgctttaatgcctttgtatcatgctattgcttcccgtatggctttcattttctcctccttgtataaatcctggttgctgtctctttatgaggagttgtggcccgttgtcaggcaacgtggcgtggtgtgcactgtgtttgctgacgcaacccccactggttggggcattgccaccacctgtcagctcctttccgggactttcgctttccccctccctattgccacggcggaactcatcgccgcctgccttgcccgctgctggacaggggctcggctgttgggcactgacaattccgtggtgttgtcggggaagctgacgtcctttccatggctgctcgcctgtgttgccacctggattctgcgcgggacgtccttctgctacgtcccttcggccctcaatccagcggaccttccttcccgcggcctgctgccggctctgcggcctcttccgcgtcttcgccttcgccctcagacgagtcggatctccctttgggccgcctccccgcctggttccgactgtgccttctagttgccagccatctgttgtttgcccctcccccgtgccttccttgaccctggaaggtgccactcccactgtcctttcctaataaaatgaggaaattgcatcgcattgtctgagtaggtgtcattctattctggggggtggggtggggcaggacagcaagggggaggattgggtagacaatagcaggcatgctggggatgcggtgggctctatggtcgagttagtttgctccagtaaagttgtttataataactactaaatccgcatgttacggaatttcttattaatttttttttcgtaaggaacaacggatcttgaatctggtcgtggtttgtctggtcaaccaccgcggtctcagtggtgtacggtacaaaccccgacgatatcggatcccgggcccgtcgactgcagaggcgatgtacgggccagatatacgcgttgacattgattattgactagttattaatagtaatcaattacggggtcattagttcatagcccatatatggagttccgcgttacataacttacggtaaatggcccgcctggctgaccgcccaacgacccccgcccattgacgtcaataatgacgtatgttcccatagtaacgccaatagggactttccattgacgtcaatgggtggagtatttacggtaaactgcccacttggcagtacatcaagtgtatcatatgccaagtacgccccctattgacgtcaatgacggtaaatggcccgcctggcattatgcccagtacatgaccttatgggactttcctacttggcagtacatctacgtattagtcatcgctattaccatggtgatgcggttttggcagtacatcaatgggcgtggatagcggtttgactcacggggatttccaagtctccaccccattgacgtcaatgggagtttgttttggcaccaaaatcaacgggactttccaaaatgtcgtaacaactccgccccattgacgcaaatgggcggtaggcgtgtacggtgggaggtctatataagcagagctctctggctaactagagaacccactgcttactggcttatcgaaattaatacgactcactatagggagacccaagctggctagcgtttaaacttaagcttgccaccatgccaaaaaagaaaagaaaagtgtatccctatgatgtccccgattatgccggttcaagagccctggtcgtgattagactgagccgagtgacagacgccaccacaagtcccgagagacagctggaatcatgccagcagctctgtgctcagcggggttgggatgtggtcggcgtggcagaggatctggacgtgagcggggccgtcgatccattcgacagaaagaggaggcccaacctggcaagatggctcgctttcgaggaagtaagtatcaaggttacaagacaggtttaaggagaccaatagaaactgggcttgtcgagacagagaagactcttgcgtttctgataggcacctattggtcttactgacatccactttgcctttctctccacagcagccctttgatgtgatcgtcgcctacagagtggaccggctgacccgctcaattcgacatctccagcagctggtgcattgggctgaggaccacaagaaactggtggtcagcgcaacagaagcccacttcgatactaccacaccttttgccgctgtggtcatagcactgatgggcactgtggcccagatggagctcgaagctatcaaggagcgaaacaggagcgcagcccatttcaatattagggccggtaaatacagaggctccctgcccccttggggatatctccctaccagggtggatggggagtggagactggtgccagaccccgtccagagagagcggattctggaagtgtaccacagagtggtcgataaccacgaaccactccatctggtggcacacgacctgaatagacgcggcgtgctctctccaaaggattattttgctcagctgcagggaagagagccacagggaagagaatggagtgctactgcactgaagagatctatgatcagtgaggctatgctgggttacgcaacactcaatggcaaaactgtccgggacgatgacggagcccctctggtgagggctgagcctattctcaccagagagcagctcgaagctctgcgggcagaactggtcaagactagtcgcgccaaaccggccgtgagcaccccaagcctgctcctgagggtgctgttctgcgccgtctgtggagagccagcatacaagtttgccggcggagggcgcaaacatccccgctatcgatgcaggagcatggggttccctaagcactgtggaaacgggacagtggccatggctgagtgggacgccttttgcgaggaacaggtgctggatctcctgggtgacgctgagcggctggaaaaagtgtgggtggcaggatctgactccgctgtggagctggcagaagtcaatgccgagctcgtggatctgacttccctcatcggatctcctgcatatagagctgggtccccacagagagaagctctggacgcacgaattgctgcactcgctgctagacaggaggaactggagggcctggaggccaggccctctggatgggagtggcgagaaaccggacagaggtttggggattggtggagggagcaggacaccgcagccaagaacacatggctgagatccatgaatgtccggctcacattcgacgtgcgcggtggcctgactcgaaccatcgattttggcgacctccaggagtatgaacagcacctgagactggggtccgtggtcgaaagactgcacactgggatgtcctaaggatccactagtccagtgtggtggaattctgcagatatccagcacagtggcggccgctcgagtctagagggcccgtttaaacccgctgatcagcctcgactgtgccttctagttgccagccatctgttgtttgcccctcccccgtgccttccttgaccctggaaggtgccactcccactgtcctttcctaataaaatgaggaaattgcatcgcattgtctgagtaggtgtcattctattctggggggtggggtggggcaggacagcaagggggaggattgggaagacaatagcaggcatgctggggatgcggtgggctctatggcttctgaggcggaaagaaccagctggggctctagggggtatccccacgcgccctgtagcggcgcattaagcgcggcgggtgtggtggttacgcgcagcgtgaccgctacacttgccacctgcatgcaagcttggtgtaatcatggtcatagctgtttcctgtgtgaaattgttatccgctcacaattccacacaacatacgagccggaagcataaagtgtaaagcctggggtgcctaatgagtgagctaactcacattaattgcgttgcgctcactgcccgctttccagtcgggaaacctgtcgtgccagctgcattaatgaatcggccaacgcgcggggagaggcggtttgcgtattgggcgctcttccgcttcctcgctcactgactcgctgcgctcggtcgttcggctgcggcgagcggtatcagctcactcaaaggcggtaatacggttatccacagaatcaggggataacgcaggaaagaacatgtgagcaaaaggccagcaaaaggccaggaaccgtaaaaaggccgcgttgctggcgtttttccataggctccgcccccctgacgagcatcacaaaaatcgacgctcaagtcagaggtggcgaaacccgacaggactataaagataccaggcgtttccccctggaagctccctcgtgcgctctcctgttccgaccctgccgcttaccggatacctgtccgcctttctcccttcgggaagcgtggcgctttctcatagctcacgctgtaggtatctcagttcggtgtaggtcgttcgctccaagctgggctgtgtgcacgaaccccccgttcagcccgaccgctgcgccttatccggtaactatcgtcttgagtccaacccggtaagacacgacttatcgccactggcagcagccactggtaacaggattagcagagcgaggtatgtaggcggtgctacagagttcttgaagtggtggcctaactacggctacactagaagaacagtatttggtatctgcgctctgctgaagccagttaccttcggaaaaagagttggtagctcttgatccggcaaacaaaccaccgctggtagcggtggtttttttgtttgcaagcagcagattacgcgcagaaaaaaaggatctcaagaagatcctttgatcttttctacggggtctgacgctcagtggaacgaaaactcacgttaagggattttggtcatgagattatcaaaaaggatcttcacctagatccttttaaattaaaaatgaagttttaaatcaagcccaatctgaataatgttacaaccaattaaccaattctgattagaaaaactcatcgagcatcaaatgaaactgcaatttattcatatcaggattatcaataccatatttttgaaaaagccgtttctgtaatgaaggagaaaactcaccgaggcagttccataggatggcaagatcctggtatcggtctgcgattccgactcgtccaacatcaatacaacctattaatttcccctcgtcaaaaataaggttatcaagtgagaaatcaccatgagtgacgactgaatccggtgagaatggcaaaagtttatgcatttctttccagacttgttcaacaggccagccattacgctcgtcatcaaaatcactcgcatcaaccaaaccgttattcattcgtgattgcgcctgagcaagacgaaatacgcgatcgctgttaaaaggacaattacaaacaggaatcgaatgcaaccggcgcaggaacactgccagcgcatcaacaatattttcacctgaatcaggatattcttctaatacctggaatgctgtttttccggggatcgcagtggtgagtaaccatgcatcatcaggagtacggataaaatgcttgatggtcggaagaggcataaattccgtcagccagtttagtctgaccatctcatctgtaacatcattggcaacgctacctttgccatgtttcagaaacaactctggcgcatcgggcttcccatacaagcgatagattgtcgcacctgattgcccgacattatcgcgagcccatttatacccatataaatcagcatccatgttggaatttaatcgcggcctcgacgtttcccgttgaatatggctcataacaccccttgtattactgtttatgtaagcagacagttttattgttcatgatgatatatttttatcttgtgcaatgtaacatcagagattttgagacacgggccagagctg

SEQ ID NO: 2638 - DNA, 2943 bp, synthetic construct; identical to SEQ ID NO: 2626
  source 1..2943: mol_type = other DNA

SEQ ID NO: 2639 - DNA, 9330 bp, synthetic construct
  source 1..9330: mol_type = other DNA
tcgcgcgtttcggtgatgacggtgaaaacctctgacacatgcagctcccggagacggtcacagcttgtctgtaagcggatgccgggagcagacaagcccgtcagggcgcgtcagcgggtgttggcgggtgtcggggctggcttaactatgcggcatcagagcagattgtactgagagtgcaccatatgcggtgtgaaataccgcacagatgcgtaaggagaaaataccgcatcaggcgccattcgccattcaggctgcgcaactgttgggaagggcgatcggtgcgggcctcttcgctattacgccagctggcgaaagggggatgtgctgcaaggcgattaagttgggtaacgccagggttttcccagtcacgacgttgtaaaacgacggccagagaattcgagctcggtacctcgcgaatacatctagatatggggtctcaatggttggctccggtgcccgtcagtgggcagagcgcacatcgcccacagtccccgagaagttgtggggaggggtcggcaattgaaccggtgcctagagaaggtggcgcggggtaaactgggaaagtgatgtcgtgtactggctccgcctttttcccgagggtgggggagaaccgtatataagtgcagtagtcgccgtgaacgttctttttcgcaacgggtttgccgccagaacacaggtaagtgccgtgtgtggttcccgcgggcctggcctctttacgggttatggcccttgcgtgccttgaattacttccacctggctgcagtacgtgattcttgatcccgagcttcgggttggaagtgggtgggagagttcgaggccttgcgcttaaggagccccttcgcctcgtgcttgagttgaggcctggcctgggcgctggggccaccgcgtgcgaatctggtggcaccttcgcgcctgtctcgctgctttcgataagtctctagccatttaaaatttttgatgacctgctgcgacgctttttttctggcaagatagtcttgtaaatgcgggccaagatctgcacactggtatttcggtttttggggccgcgggcggcgacggggcccgtgcgtcccagcgcacatgttcggcgaggcggggcctgcgagcgcggccaccgagaatcggacgggggtagtctcaagctggccggcctgctctggtgcctggcctcgcgccgccgtgtatcgccccgccctgggcggcaaggctggcccggtcggcaccagttgcgtgagcggaaagatggccgcttcccggccctgctgcagggagctcaaaatggaggacgcggcgctcgggagagcgggcgggtgagtcacccacacaaaggaaaagggcctttccgtcctcagccgtcgcttcatgtgactccacggagtaccgggcgccgtccaggcacctcgattagttctcgagcttttggagtacgtcgtctttaggttggggggaggggttttatgcgatggagtttccccacactgagtgggtggagactgaagttaggccagcttggcacttgatgtaattctccttggaatttgccctttttgagtttggatcttggttcattctcaagcctcagacagtggttcaaagtttttttcttccatttcaggtggtggatctacaaaaaagcagatccaccggtcgccaccggtgctgaagatgtcagattattataaaaaactaaccattggaccacgccatgcacaactaaactggaccaacgctattgttacccttcacgatctacaatgccaatgtgatgaaccattatgccacaccattgaaacaattgtaaatcaagaaaaatctttaaaattctcaaaaggattatctgacaaaattaaatcatgccttacggctggagaccatggcgccgcagacgtcgtagaagattttggagacgacgagctagagcgccttttcgcagaagacggtactggagatacagatacagggtaagaaaacttcgtactaaacctaaaaagttaactgtaaaacaatggcaaccaacaaaaatgcggaggctaactgtaactggaaaatacccactttttgagggaacctccgaaagaattggaaataacaatactcaaagtatagacacaattgctccttacttattcccgtctggaggactattttcaataactgtttttactttaaaaggactatatgaacttcacttaaaggctagaaactggtggtctatatctaactgtaacttaccattgataaaatacagaggatgtaaaataactttgtatagaaatactgatgttgactttgtaactgtatatactagatgtggttcactaactgctacagaagaactatacagatcttgccaacctagtttattgctattaaacaaacacaaaaaagtacttacatgcaaaaaaaacaataacaaacgcaaaataagtaaaactataaaaataccaccaccagcactcatgcaaaacaaatggtactttcaaaaagactttgcaaattatccacttgtaatgctattatctgcagctctaagcttagacagatattacacttcagcaaactctatttccagtactataggctttgctagcataaacacaacaatatttcaatacagtgacttcaaatcacctaatataacacaaccatacaaaccaaacgaccagtactggctaggaacatggacaaatcaaacagttactgactttactaaagtacaagtacaacacttaatattactagcaaacacgaatgattatcaaccaggacagccactaggcccaaacaaaacttcctataaagactactttaaatcaaaaattaaatggggaaaccccttttatgcaccttactttgaacctgaaccacaaaaaatttttatgattacaagtttacaaaaaatagaagaagctcaaccaaacgcatatataaacagtttaggatgcactctactaccaccagaaaaaacacttctaacaatttgcagatacaacccccaaaacgacagatcaagacataatgcactatatgcaagccctgtaacaacagccaaaacaaagtggggggcaacaacaaagccagaactaaacacagaaggcttaccactatggttactatcatttggtttccatgactggctcttaaaatctgaaaaagtacaaagactagacctagactatgtatatgttatactatcagaatacataacaccaaaaatggaacattatgtacccgtagaccctaactttacacaaggtagaagtccctttgaaataacagatcacatgagaccaccagacgtaggatactggtttccaaaaactagctaccaacatactgtattttctgaaataataaatacaggtcctggaactgtaaaactaccacctagaatatcagttgaagcaagcatgaaatacaaattttactttacattagggggatgtccacctccaatggacaatgtttgtgacccacaggcccagccggactttcctgaacccggtaacatcatatcgccaactttattgcaggatccagaataccccatcgaatactacttgcaagcctttgacgagcgcaggggactccttacaaaaaaggctgcaaaacgaatcaaaaaagactacgaaactgaacaagatattttctcatctacaggacaaactgcaatggacgtccaactcaaaaccccggagacaacatcgacagaggactcatcggaggaggaaaaagagccgcaaacactgcagttccagctccagcgacacaagcgaaagcagcggaaactcagacaccgaatcctccagttgttaaaactagccaaagatatataataaaacgtagtactataactgtaaatatgtttgatccccctcctcctaaaaacaggagaataacaggctcagactttgaaactgaattacaactagctaaatggatgcacagaccacccagatattatcataatgataaacctttctatccctggctacctatggaaccccttgtaaaccaactgcctaatgtaaatttcaaactcaactttactgaataataatgagacctaaaatgaatgcaattgttgttgttaacggggatcctcatcgcggccgctacgtaaattccgccccccccccccctctccctcccccccccctaacgttactggccgaagccgcttggaataaggccggtgtgcgtttgtctatatgttattttccaccatattgccgtcttttggcaatgtgagggcccggaaacctggccctgtcttcttgacgagcattcctaggggtctttcccctctcgccaaaggaatgcaaggtctgttgaatgtcgtgaaggaagcagttcctctggaagcttcttgaagacaaacaacgtctgtagcgaccctttgcaggcagcggaaccccccacctggcgacaggtgcctctgcggccaaaagccacgtgtataagatacacctgcaaaggcggcacaaccccagtgccacgttgtgagttggatagttgtggaaagagtcaaatggctctcctcaagcgtattcaacaaggggctgaaggatgcccagaaggtaccccattgtatgggatctgatctggggcctcggtgcacatgctttacatgtgtttagtcgaggttaaaaaaacgtctaggccccccgaaccacggggacgtggttttcctttgaaaaacacgatgataatatggccacaaccatggataaagttttaaacagagaggaatctttgcagctaatggaccttctaggtcttgaaaggagtgcctgggggaatattcctctgatgagaaaggcatatttaaaaaaatgcaaggagtttcatcctgataaaggaggagatgaagaaaaaatgaagaaaatgaatactctgtacaagaaaatggaagatggagtaaaatatgctcatcaacctgactttggaggcttctgggatgcaactgagattccaacctatggaactgatgaatgggagcagtggtggaatgcctttaatgaggaaaacctgttttgctcagaagaaatgccatctagtgatgatgaggctactgctgactctcaacattctactcctccaaaaaagaagagaaaggtagaagaccccaaggactttccttcagaattgctaagttttttgagtcatgctgtgtttagtaatagaactcttgcttgctttgctatttacaccacaaaggaaaaagctgcactgctatacaagaaaattatggaaaaatattctgtaacctttataagtaggcataacagttataatcataacatactgttttttcttactccacacaggcatagagtgtctgctattaataactatgctcaaaaattgtgtacctttagctttttaatttgtaaaggggttaataaggaatatttgatgtatagtgccttgactagagatccattttctgttattgaggaaagtttgccaggtgggttaaaggagcatgattttaatccagaagaagcagaggaaactaaacaagtgtcctggaagcttgtaacagagtatgcaatggaaacaaaatgtgatgatgtgttgttattgcttgggatgtacttggaatttcagtacagttttgaaatgtgtttaaaatgtattaaaaaagaacagcccagccactataagtaccatgaaaagcattatgcaaatgctgctatatttgctgacagcaaaaaccaaaaaaccatatgccaacaggctgttgatactgttttagctaaaaagcgggttgatagcctacaattaactagagaacaaatgttaacaaacagatttaatgatcttttggataggatggatataatgtttggttctacaggctctgctgacatagaagaatggatggctggagttgcttggctacactgtttgttgcccaaaatggattcagtggtgtatgactttttaaaatgcatggtgtacaacattcctaaaaaaagatactggctgtttaaaggaccaattgatagtggtaaaactacattagcagctgctttgcttgaattatgtggggggaaagctttaaatgttaatttgcccttggacaggctgaactttgagctaggagtagctattgaccagtttttagtagtttttgaggatgtaaagggcactggaggggagtccagagatttgccttcaggtcagggaattaataacctggacaatttaagggattatttggatggcagtgttaaggtaaacttagaaaagaaacacctaaataaaagaactcaaatatttccccctggaatagtcaccatgaatgagtacagtgtgcctaaaacactgcaggccagatttgtaaaacaaatagattttaggcccaaagattatttaaagcattgcctggaacgcagtgagtttttgttagaaaagagaataattcaaagtggcattgctttgcttcttatgttaatttggtacagacctgtggctgagtttgctcaaagtattcagagcagaattgtggagtggaaagagagattggacaaagagtttagtttgtcagtgtatcaaaaaatgaagtttaatgtggctatgggaattggagttttagattggctaagaaacagtgatgatgatgatgaagacagccaggaaaatgctgataaaaatgaagatggtggggagaagaacatggaagactcagggcatgaaacaggcattgattcacagtcccaaggctcatttcaggcccctcagtcctcacagtctgttcatgatcataatcagccataccacatttgtagaggttttacttgctttaaaaaacctcccacacctccccctgaacctgaaacataataagcttgcggccgcttcgagcagacatgataagatacattgatgagtttggacaaaccacaactagaatgcagtgaaaaaaatgctttatttgtgaaatttgtgatgctattgctttatttgtaaccattataagctgcaataaacaagtttcatgtctggctctagctatcccgcccctaactccgcccatcccgcccctaactccgcccagttccgcccattctccgccccatggctgactaattttttttatttatgcagaggccgaggccgcctcggcctctgagctattccagaagtagtgaggaggcttttttggaggccatcggatcccgggcccgtcgactgcagaggcctgcatgcaagcttggtgtaatcatggtcatagctgtttcctgtgtgaaattgttatccgctcacaattccacacaacatacgagccggaagcataaagtgtaaagcctggggtgcctaatgagtgagctaactcacattaattgcgttgcgctcactgcccgctttccagtcgggaaacctgtcgtgccagctgcattaatgaatcggccaacgcgcggggagaggcggtttgcgtattgggcgctcttccgcttcctcgctcactgactcgctgcgctcggtcgttcggctgcggcgagcggtatcagctcactcaaaggcggtaatacggttatccacagaatcaggggataacgcaggaaagaacatgtgagcaaaaggccagcaaaaggccaggaaccgtaaaaaggccgcgttgctggcgtttttccataggctccgcccccctgacgagcatcacaaaaatcgacgctcaagtcagaggtggcgaaacccgacaggactataaagataccaggcgtttccccctggaagctccctcgtgcgctctcctgttccgaccctgccgcttaccggatacctgtccgcctttctcccttcgggaagcgtggcgctttctcatagctcacgctgtaggtatctcagttcggtgtaggtcgttcgctccaagctgggctgtgtgcacgaaccccccgttcagcccgaccgctgcgccttatccggtaactatcgtcttgagtccaacccggtaagacacgacttatcgccactggcagcagccactggtaacaggattagcagagcgaggtatgtaggcggtgctacagagttcttgaagtggtggcctaactacggctacactagaagaacagtatttggtatctgcgctctgctgaagccagttaccttcggaaaaagagttggtagctcttgatccggcaaacaaaccaccgctggtagcggtggtttttttgtttgcaagcagcagattacgcgcagaaaaaaaggatctcaagaagatcctttgatcttttctacggggtctgacgctcagtggaacgaaaactcacgttaagggattttggtcatgagattatcaaaaaggatcttcacctagatccttttaaattaaaaatgaagttttaaatcaagcccaatctgaataatgttacaaccaattaaccaattctgattagaaaaactcatcgagcatcaaatgaaactgcaatttattcatatcaggattatcaataccatatttttgaaaaagccgtttctgtaatgaaggagaaaactcaccgaggcagttccataggatggcaagatcctggtatcggtctgcgattccgactcgtccaacatcaatacaacctattaatttcccctcgtcaaaaataaggttatcaagtgagaaatcaccatgagtgacgactgaatccggtgagaatggcaaaagtttatgcatttctttccagacttgttcaacaggccagccattacgctcgtcatcaaaatcactcgcatcaaccaaaccgttattcattcgtgattgcgcctgagcgagacgaaatacgcgatcgctgttaaaaggacaattacaaacaggaatcgaatgcaaccggcgcaggaacactgccagcgcatcaacaatattttcacctgaatcaggatattcttctaatacctggaatgctgtttttccggggatcgcagtggtgagtaaccatgcatcatcaggagtacggataaaatgcttgatggtcggaagaggcataaattccgtcagccagtttagtctgaccatctcatctgtaacatcattggcaacgctacctttgccatgtttcagaaacaactctggcgcatcgggcttcccatacaagcgatagattgtcgcacctgattgcccgacattatcgcgagcccatttatacccatataaatcagcatccatgttggaatttaatcgcggcctcgacgtttcccgttgaatatggctcataacaccccttgtattactgtttatgtaagcagacagttttattgttcatgatgatatatttttatcttgtgcaatgtaacatcagagattttgagacacgggccagagctgca

SEQ ID NO: 2640 - DNA, 9473 bp, synthetic construct
  source 1..9473: mol_type = other DNA
aatgagacctaaaatgaatgcaattgttgttgttaacggggatcctcatcgcggccgctacgtaaattccgccccccccccccctctccctcccccccccctaacgttactggccgaagccgcttggaataaggccggtgtgcgtttgtctatatgttattttccaccatattgccgtcttttggcaatgtgagggcccggaaacctggccctgtcttcttgacgagcattcctaggggtctttcccctctcgccaaaggaatgcaaggtctgttgaatgtcgtgaaggaagcagttcctctggaagcttcttgaagacaaacaacgtctgtagcgaccctttgcaggcagcggaaccccccacctggcgacaggtgcctctgcggccaaaagccacgtgtataagatacacctgcaaaggcggcacaaccccagtgccacgttgtgagttggatagttgtggaaagagtcaaatggctctcctcaagcgtattcaacaaggggctgaaggatgcccagaaggtaccccattgtatgggatctgatctggggcctcggtgcacatgctttacatgtgtttagtcgaggttaaaaaaacgtctaggccccccgaaccacggggacgtggttttcctttgaaaaacacgatgataatatggccacaaccatggataaagttttaaacagagaggaatctttgcagctaatggaccttctaggtcttgaaaggagtgcctgggggaatattcctctgatgagaaaggcatatttaaaaaaatgcaaggagtttcatcctgataaaggaggagatgaagaaaaaatgaagaaaatgaatactctgtacaagaaaatggaagatggagtaaaatatgctcatcaacctgactttggaggcttctgggatgcaactgagattccaacctatggaactgatgaatgggagcagtggtggaatgcctttaatgaggaaaacctgttttgctcagaagaaatgccatctagtgatgatgaggctactgctgactctcaacattctactcctccaaaaaagaagagaaaggtagaagaccccaaggactttccttcagaattgctaagttttttgagtcatgctgtgtttagtaatagaactcttgcttgctttgctatttacaccacaaaggaaaaagctgcactgctatacaagaaaattatggaaaaatattctgtaacctttataagtaggcataacagttataatcataacatactgttttttcttactccacacaggcatagagtgtctgctattaataactatgctcaaaaattgtgtacctttagctttttaatttgtaaaggggttaataaggaatatttgatgtatagtgccttgactagagatccattttctgttattgaggaaagtttgccaggtgggttaaaggagcatgattttaatccagaagaagcagaggaaactaaacaagtgtcctggaagcttgtaacagagtatgcaatggaaacaaaatgtgatgatgtgttgttattgcttgggatgtacttggaatttcagtacagttttgaaatgtgtttaaaatgtattaaaaaagaacagcccagccactataagtaccatgaaaagcattatgcaaatgctgctatatttgctgacagcaaaaaccaaaaaaccatatgccaacaggctgttgatactgttttagctaaaaagcgggttgatagcctacaattaactagagaacaaatgttaacaaacagatttaatgatcttttggataggatggatataatgtttggttctacaggctctgctgacatagaagaatggatggctggagttgcttggctacactgtttgttgcccaaaatggattcagtggtgtatgactttttaaaatgcatggtgtacaacattcctaaaaaaagatactggctgtttaaaggaccaattgatagtggtaaaactacattagcagctgctttgcttgaattatgtggggggaaagctttaaatgttaatttgcccttggacaggctgaactttgagctaggagtagctattgaccagtttttagtagtttttgaggatgtaaagggcactggaggggagtccagagatttgccttcaggtcagggaattaataacctggacaatttaagggattatttggatggcagtgttaaggtaaacttagaaaagaaacacctaaataaaagaactcaaatatttccccctggaatagtcaccatgaatgagtacagtgtgcctaaaacactgcaggccagatttgtaaaacaaatagattttaggcccaaagattatttaaagcattgcctggaacgcagtgagtttttgttagaaaagagaataattcaaagtggcattgctttgcttcttatgttaatttggtacagacctgtggctgagtttgctcaaagtattcagagcagaattgtggagtggaaagagagattggacaaagagtttagtttgtcagtgtatcaaaaaatgaagtttaatgtggctatgggaattggagttttagattggctaagaaacagtgatgatgatgatgaagacagccaggaaaatgctgataaaaatgaagatggtggggagaagaacatggaagactcagggcatgaaacaggcattgattcacagtcccaaggctcatttcaggcccctcagtcctcacagtctgttcatgatcataatcagccataccacatttgtagaggttttacttgctttaaaaaacctcccacacctccccctgaacctgaaacataataagcttgcggccgcttcgagcagacatgataagatacattgatgagtttggacaaaccacaactagaatgcagtgaaaaaaatgctttatttgtgaaatttgtgatgctattgctttatttgtaaccattataagctgcaataaacaagtttcatgtctggctctagctatcccgcccctaactccgcccatcccgcccctaactccgcccagttccgcccattctccgccccatggctgactaattttttttatttatgcagaggccgaggccgcctcggcctctgagctattccagaagtagtgaggaggcttttttggaggccatcggatcccgggcccgtcgactgcagaggcctgcatgcaagcttggtgtaatcatggtcatagctgtttcctgtgtgaaattgttatccgctcacaattccacacaacatacgagccggaagcataaagtgtaaagcctggggtgcctaatgagtgagctaactcacattaattgcgttgcgctcactgcccgctttccagtcgggaaacctgtcgtgccagctgcattaatgaatcggccaacgcgcggggagaggcggtttgcgtattgggcgctcttccgcttcctcgctcactgactcgctgcgctcggtcgttcggctgcggcgagcggtatcagctcactcaaaggcggtaatacggttatccacagaatcaggggataacgcaggaaagaacatgtgagcaaaaggccagcaaaaggccaggaaccgtaaaaaggccgcgttgctggcgtttttccataggctccgcccccctgacgagcatcacaaaaatcgacgctcaagtcagaggtggcgaaacccgacaggactataaagataccaggcgtttccccctggaagctccctcgtgcgctctcctgttccgaccctgccgcttaccggatacctgtccgcctttctcccttcgggaagcgtggcgctttctcatagctcacgctgtaggtatctcagttcggtgtaggtcgttcgctccaagctgggctgtgtgcacgaaccccccgttcagcccgaccgctgcgccttatccggtaactatcgtcttgagtccaacccggtaagacacgacttatcgccactggcagcagccactggtaacaggattagcagagcgaggtatgtaggcggtgctacagagttcttgaagtggtggcctaactacggctacactagaagaacagtatttggtatctgcgctctgctgaagccagttaccttcggaaaaagagttggtagctcttgatccggcaaacaaaccaccgctggtagcggtggtttttttgtttgcaagcagcagattacgcgcagaaaaaaaggatctcaagaagatcctttgatcttttctacggggtctgacgctcagtggaacgaaaactcacgttaagggattttggtcatgagattatcaaaaaggatcttcacctagatccttttaaattaaaaatgaagttttaaatcaagcccaatctgaataatgttacaaccaattaaccaattctgattagaaaaactcatcgagcatcaaatgaaactgcaatttattcatatcaggattatcaataccatatttttgaaaaagccgtttctgtaatgaaggagaaaactcaccgaggcagttccataggatggcaagatcctggtatcggtctgcgattccgactcgtccaacatcaatacaacctattaatttcccctcgtcaaaaataaggttatcaagtgagaaatcaccatgagtgacgactgaatccggtgagaatggcaaaagtttatgcatttctttccagacttgttcaacaggccagccattacgctcgtcatcaaaatcactcgcatcaaccaaaccgttattcattcgtgattgcgcctgagcgagacgaaatacgcgatcgctgttaaaaggacaattacaaacaggaatcgaatgcaaccggcgcaggaacactgccagcgcatcaacaatattttcacctgaatcaggatattcttctaatacctggaatgctgtttttccggggatcgcagtggtgagtaaccatgcatcatcaggagtacggataaaatgcttgatggtcggaagaggcataaattccgtcagccagtttagtctgaccatctcatctgtaacatcattggcaacgctacctttgccatgtttcagaaacaactctggcgcatcgggcttcccatacaagcgatagattgtcgcacctgattgcccgacattatcgcgagcccatttatacccatataaatcagcatccatgttggaatttaatcgcggcctcgacgtttcccgttgaatatggctcataacaccccttgtattactgtttatgtaagcagacagttttattgttcatgatgatatatttttatcttgtgcaatgtaacatcagagattttgagacacgggccagagctgcatcgcgcgtttcggtgatgacggtgaaaacctctgacacatgcagctcccggagacggtcacagcttgtctgtaagcggatgccgggagcagacaagcccgtcagggcgcgtcagcgggtgttggcgggtgtcggggctggcttaactatgcggcatcagagcagattgtactgagagtgcaccatatgcggtgtgaaataccgcacagatgcgtaaggagaaaataccgcatcaggcgccattcgccattcaggctgcgcaactgttgggaagggcgatcggtgcgggcctcttcgctattacgccagctggcgaaagggggatgtgctgcaaggcgattaagttgggtaacgccagggttttcccagtcacgacgttgtaaaacgacggccagagaattcgagctcggtacctcgcgaatacatctagatatggggtctcaatggttggctccggtgcccgtcagtgggcagagcgcacatcgcccacagtccccgagaagttgtggggaggggtcggcaattgaaccggtgcctagagaaggtggcgcggggtaaactgggaaagtgatgtcgtgtactggctccgcctttttcccgagggtgggggagaaccgtatataagtgcagtagtcgccgtgaacgttctttttcgcaacgggtttgccgccagaacacaggtaagtgccgtgtgtggttcccgcgggcctggcctctttacgggttatggcccttgcgtgccttgaattacttccacctggctgcagtacgtgattcttgatcccgagcttcgggttggaagtgggtgggagagttcgaggccttgcgcttaaggagccccttcgcctcgtgcttgagttgaggcctggcctgggcgctggggccaccgcgtgcgaatctggtggcaccttcgcgcctgtctcgctgctttcgataagtctctagccatttaaaatttttgatgacctgctgcgacgctttttttctggcaagatagtcttgtaaatgcgggccaagatctgcacactggtatttcggtttttggggccgcgggcggcgacggggcccgtgcgtcccagcgcacatgttcggcgaggcggggcctgcgagcgcggccaccgagaatcggacgggggtagtctcaagctggccggcctgctctggtgcctggcctcgcgccgccgtgtatcgccccgccctgggcggcaaggctggcccggtcggcaccagttgcgtgagcggaaagatggccgcttcccggccctgctgcagggagctcaaaatggaggacgcggcgctcgggagagcgggcgggtgagtcacccacacaaaggaaaagggcctttccgtcctcagccgtcgcttcatgtgactccacggagtaccgggcgccgtccaggcacctcgattagttctcgagcttttggagtacgtcgtctttaggttggggggaggggttttatgcgatggagtttccccacactgagtgggtggagactgaagttaggccagcttggcacttgatgtaattctccttggaatttgccctttttgagtttggatcttggttcattctcaagcctcagacagtggttcaaagtttttttcttccatttcaggtggtggatctacaaaaaagcagatccaccggtcgccaccgccgccagacggagacgggatcacttcagtgactccaggctgatcaagggcgggtgccgaaggtgagtgaaaccaccgtagtcaaggggcaattcgggctagatcagtctggcggaacgggcaagaaacttaaaatgtactttattttacagaaatgttcaaatctccaacatacttaacaactaaaggcaaaaacaatgccttaatcaactgcttcgttggagaccacgatcttctgtgcagctgtaacaatcctgcctaccattgcctccaaatacttgcaactaccttagcacctcaactaaaacaagaagaaaaacaacaaataatacaatgccttggtggtacagacgccgtagctacaacccgtggagacgaagaaattggtttagaagacctagaaaaactatttacagaagatacagaagaagacgccgctgggtaagaagaaaacctttttacaaacgtaaaattaagagactaaatatagtagaatggcaacctaaatcaattagaaaatgtagaataaaaggaatgctatgcttgtttcaaacgacagaagacagactgtcatataactttgatatgtatgaagagtctattataccagaaaaactgccgggaggggggggatttagcattaagaatataagcttatatgccttataccaagaacacatacatgcacacaacatatttacacacacaaacacagacagaccactagcaagatacacaggctgttctttaaaattctaccaaagcaaagacatagactacgtagtaacatattctacatcactcccactaagaagctcaatgggaatgtacaactccatgcaaccatccatacatctaatgcaacaaaacaaactaattgtaccaagcaaacaaacacaaaaaagaagaaaaccatatattaaaaaacatatatcaccaccaacacaaatgaaatctcaatggtactttcaacataacattgcaaacataccgctactaatgataagaaccacagcattaacattagataattactatataggaagcagacaattaagtacaaatgtcactatacatacacttaacacaacatacatccaaaacagagactggggagacagaaataaaacttactactgccaaacattaggaacacaaagatacttcctatatggaacacattcaactgcacaaaatattaatgacataaagctacaagaactaatacctttaacaaacacacaagactatgtacaaggctttgattggacagaaaaagacaaacataacataacaacctacaaagaattcttaactaaaggagcaggaaatccatttcacgcagaatggataacagcacaaaacccagtaatacacacagcaaacagtcctacacaaatagaacaaatatacaccgcttcaacaacaacattccaaaacaaaaaactaacagacctaccaacgccaggatatatatttataactccaacagtaagcttaagatacaacccatacaaagacctagcagaaagaaacaaatgctactttgtaagaagcaaaataaatgcacacgggtgggacccagaacaacaccaagaattaataaacagtgacctaccacaatggttactattatttggctacccagactacataaaaagaacacaaaactttgcattagtagacacaaattacatactagtagaccactgcccatacacaaatccagaaaaaacaccatttatacctttaagcacatcatttatagaaggtagaagcccatacagtccttcagacacacatgaaccagatgaagaagaccaaaacaggtggtacccatgctaccaatatcaacaagaatcaataaattcaatatgtcttagcggtccaggcacaccaaaaataccaaaaggaataacagcagaagcaaaagtaaaatattcctttaattttaagtggggtggtgacctaccaccaatgtctacaattacaaacccgacagaccagccaacatatgttgttcccaataacttcaatgaaacaacttcgttacagaatccaaccaccagaccagagcacttcttgtactcctttgacgaaaggaggggacaacttacagaaaaagctacaaaacgcttgcttaaagactgggaaactaaagaaacttctttattgtctacagaatacagattcgcggagccaacacaaacacaagccccacaagaggacccgtcctcggaagaagaagaagagagcaacctcttcgagcgactcctccgacagcgaaccaagcagctccagctcaagcgcagaataatacaaacattgaaagacctacaaaaattagaataactaacagcaaaaacaccgtttacctatttccacctgaacaaaagaacagaagactaacaccatgggaaatacaagaagacaaagaaatagccaatttatttggcagaccacatagatactttttaaaagacattcctttctattgggatatacccccagagcctaaagtaaactttgatttaaattttcaataa

SEQ ID NO: 2641 - DNA, 9320 bp, synthetic construct
  source 1..9320: mol_type = other DNA
tcgcgcgtttcggtgatgacggtgaaaacctctgacacatgcagctcccggagacggtcacagcttgtctgtaagcggatgccgggagcagacaagcccgtcagggcgcgtcagcgggtgttggcgggtgtcggggctggcttaactatgcggcatcagagcagattgtactgagagtgcaccatatgcggtgtgaaataccgcacagatgcgtaaggagaaaataccgcatcaggcgccattcgccattcaggctgcgcaactgttgggaagggcgatcggtgcgggcctcttcgctattacgccagctggcgaaagggggatgtgctgcaaggcgattaagttgggtaacgccagggttttcccagtcacgacgttgtaaaacgacggccagagaattcgagctcggtacctcgcgaatacatctagatatggttggctccggtgcccgtcagtgggcagagcgcacatcgcccacagtccccgagaagttgtggggaggggtcggcaattgaaccggtgcctagagaaggtggcgcggggtaaactgggaaagtgatgtcgtgtactggctccgcctttttcccgagggtgggggagaaccgtatataagtgcagtagtcgccgtgaacgttctttttcgcaacgggtttgccgccagaacacaggtaagtgccgtgtgtggttcccgcgggcctggcctctttacgggttatggcccttgcgtgccttgaattacttccacctggctgcagtacgtgattcttgatcccgagcttcgggttggaagtgggtgggagagttcgaggccttgcgcttaaggagccccttcgcctcgtgcttgagttgaggcctggcctgggcgctggggccaccgcgtgcgaatctggtggcaccttcgcgcctgtctcgctgctttcgataagtctctagccatttaaaatttttgatgacctgctgcgacgctttttttctggcaagatagtcttgtaaatgcgggccaagatctgcacactggtatttcggtttttggggccgcgggcggcgacggggcccgtgcgtcccagcgcacatgttcggcgaggcggggcctgcgagcgcggccaccgagaatcggacgggggtagtctcaagctggccggcctgctctggtgcctggcctcgcgccgccgtgtatcgccccgccctgggcggcaaggctggcccggtcggcaccagttgcgtgagcggaaagatggccgcttcccggccctgctgcagggagctcaaaatggaggacgcggcgctcgggagagcgggcgggtgagtcacccacacaaaggaaaagggcctttccgtcctcagccgtcgcttcatgtgactccacggagtaccgggcgccgtccaggcacctcgattagttctcgagcttttggagtacgtcgtctttaggttggggggaggggttttatgcgatggagtttccccacactgagtgggtggagactgaagttaggccagcttggcacttgatgtaattctccttggaatttgccctttttgagtttggatcttggttcattctcaagcctcagacagtggttcaaagtttttttcttccatttcaggtgagtttatgccgtcagacggagcgcagaacggagtctcagcgctgacccagggcgggtgccgaagatgtccagatatgttccagttaaaaactcaattaaaaatagaaacctagattggattaactgcattgttcaagttcacaacctacaatgttcctgtgaaacaccacttgaacacaccgtagaagaaattctacatcaagaacctaatttggattataaaaaaccaacaaaatgccctactggtaccgcagaccaacttactacagaagaagacgtttttggcgaaggaagtttagaggcccttttcgcagaaaactttggagaagaagaagacgcacctacagggtaagaaaaactaaaaagaaacttaaatacttacatttaaaagaatggcaaccaactagaatcagaaaactaaaaataactggcattatgcctttatacttaacaactcatgacagagtgtcaaataatatggaaatttatatagattctatagcaccaactcatgtacctagtggtggaggattctctattcaacaatatactttaaatggattttatgaactatttactaaaggacgttgttggtggactcaatctactaaagactttcctttaataagatatactggatgtaaaattgacttgtatagatcacaaaactctgactatatttttaactatataaactgttatcctatgagagctaatatggaaacttatcaaagctgtcaacctactatattacagttaactaagaaccataaaattgtcagatgtaaaaaagataacaacttaaaaaaaccatataaaagaattaaaatacacccaccagcacaatttcaaaacaagtggctatttcaaaaggatatggcaagtataccgttacttatgacacgctgctgcgcaacctccctagaccgttggtttcttgcaagcaatgcgcaatcaaccacaataggctttacatcacttaaccccgaaacctttcttttacacaactttcaacgaccaccaacagcaggctacataccaagaccaggagtatacatgtttgccttaactaatggtgcacatgactggtcacaagaaaaaataggagatattatatacctgggtaattctaatcatttacaaccaggaataaccatgagagaattaacacaaagtacagacacttttgacactgtctggacaaaatactttagcagttcagattactggggaaacatatttcttgcaaagtatcttaaacaagaagtaagacttgtagtttctaatttatctccatcacaactaaagcaacattactcctcatttgacactgccataggtaaaacaaactttacattaagaactataccaaacttaatagaatgtagatacaatcccttacaagacagaggtgaccaaaatgaagtatttataacttctatagtgtcagatgctacaccaatacaattaccaacagacccttcactaaaaacagaaaacttacctttatggctggcattcatgggatttatagactttcaaaaaagacagggtacagcacaaaaagtagatgttaactatatggttgtatttcatacaaaatatatgtctcctaaaaacctttcctgggtaatacctatagacaatgactttttaaaccaacactcagaataccaccctgatgacgaagtaacagactatgatagagaaaactggcatccaaaaacaatatttcaatataaaacatgtaatgaaatagttgcatgtggaccaggaataataaaattaccacaaaatgtatcagctgaagctcatgcaaaatacaccttttattttaaggttggaggctgtgctgcagacacaaaagacattaaaaacccagaagaccagccaaaatttcccactcccattaacttcatacaatcaaattcgttgcagaatccagaaaccccaattgaaaactacttatacagctttgactggagaagggacgtccttacaccaaaagctgcagaaagaatcgcagaatactgccttactgaaaagcctttttctgaacttacaggaatcaacatcttcgaaacagaaacatccccagaaacaacatcgacagaaaaccaaacgacacaggaaaaagaaaaagaagcattacagctcctcatccagcagcaccaactccaacagcgagatttcaagcgacgaatcctccaactgctaacacaattaacataaccacttttatatgtcaaaataaagttcaattgtttcctactgctaaaaagaacaggagatttactcctgaggagttcaaagaagaactccaagaggcagcaatatggaaaagagtgcctagaacacatatttttgacagacctacttatccttatctaccatgtgattattctaaaatggttaactttgacttaaacccttctctgtatggaatttaataaaatgaatgcaattgttgttgttaacggggatcctcatcgcggccgctacgtaaattccgccccccccccccctctccctcccccccccctaacgttactggccgaagccgcttggaataaggccggtgtgcgtttgtctatatgttattttccaccatattgccgtcttttggcaatgtgagggcccggaaacctggccctgtcttcttgacgagcattcctaggggtctttcccctctcgccaaaggaatgcaaggtctgttgaatgtcgtgaaggaagcagttcctctggaagcttcttgaagacaaacaacgtctgtagcgaccctttgcaggcagcggaaccccccacctggcgacaggtgcctctgcggccaaaagccacgtgtataagatacacctgcaaaggcggcacaaccccagtgccacgttgtgagttggatagttgtggaaagagtcaaatggctctcctcaagcgtattcaacaaggggctgaaggatgcccagaaggtaccccattgtatgggatctgatctggggcctcggtgcacatgctttacatgtgtttagtcgaggttaaaaaaacgtctaggccccccgaaccacggggacgtggttttcctttgaaaaacacgatgataatatggccacaaccatggataaagttttaaacagagaggaatctttgcagctaatggaccttctaggtcttgaaaggagtgcctgggggaatattcctctgatgagaaaggcatatttaaaaaaatgcaaggagtttcatcctgataaaggaggagatgaagaaaaaatgaagaaaatgaatactctgtacaagaaaatggaagatggagtaaaatatgctcatcaacctgactttggaggcttctgggatgcaactgagattccaacctatggaactgatgaatgggagcagtggtggaatgcctttaatgaggaaaacctgttttgctcagaagaaatgccatctagtgatgatgaggctactgctgactctcaacattctactcctccaaaaaagaagagaaaggtagaagaccccaaggactttccttcagaattgctaagttttttgagtcatgctgtgtttagtaatagaactcttgcttgctttgctatttacaccacaaaggaaaaagctgcactgctatacaagaaaattatggaaaaatattctgtaacctttataagtaggcataacagttataatcataacatactgttttttcttactccacacaggcatagagtgtctgctattaataactatgctcaaaaattgtgtacctttagctttttaatttgtaaaggggttaataaggaatatttgatgtatagtgccttgactagagatccattttctgttattgaggaaagtttgccaggtgggttaaaggagcatgattttaatccagaagaagcagaggaaactaaacaagtgtcctggaagcttgtaacagagtatgcaatggaaacaaaatgtgatgatgtgttgttattgcttgggatgtacttggaatttcagtacagttttgaaatgtgtttaaaatgtattaaaaaagaacagcccagccactataagtaccatgaaaagcattatgcaaatgctgctatatttgctgacagcaaaaaccaaaaaaccatatgccaacaggctgttgatactgttttagctaaaaagcgggttgatagcctacaattaactagagaacaaatgttaacaaacagatttaatgatcttttggataggatggatataatgtttggttctacaggctctgctgacatagaagaatggatggctggagttgcttggctacactgtttgttgcccaaaatggattcagtggtgtatgactttttaaaatgcatggtgtacaacattcctaaaaaaagatactggctgtttaaaggaccaattgatagtggtaaaactacattagcagctgctttgcttgaattatgtggggggaaagctttaaatgttaatttgcccttggacaggctgaactttgagctaggagtagctattgaccagtttttagtagtttttgaggatgtaaagggcactggaggggagtccagagatttgccttcaggtcagggaattaataacctggacaatttaagggattatttggatggcagtgttaaggtaaacttagaaaagaaacacctaaataaaagaactcaaatatttccccctggaatagtcaccatgaatgagtacagtgtgcctaaaacactgcaggccagatttgtaaaacaaatagattttaggcccaaagattatttaaagcattgcctggaacgcagtgagtttttgttagaaaagagaataattcaaagtggcattgctttgcttcttatgttaatttggtacagacctgtggctgagtttgctcaaagtattcagagcagaattgtggagtggaaagagagattggacaaagagtttagtttgtcagtgtatcaaaaaatgaagtttaatgtggctatgggaattggagttttagattggctaagaaacagtgatgatgatgatgaagacagccaggaaaatgctgataaaaatgaagatggtggggagaagaacatggaagactcagggcatgaaacaggcattgattcacagtcccaaggctcatttcaggcccctcagtcctcacagtctgttcatgatcataatcagccataccacatttgtagaggttttacttgctttaaaaaacctcccacacctccccctgaacctgaaacataataagcttgcggccgcttcgagcagacatgataagatacattgatgagtttggacaaaccacaactagaatgcagtgaaaaaaatgctttatttgtgaaatttgtgatgctattgctttatttgtaaccattataagctgcaataaacaagtttcatgtctggctctagctatcccgcccctaactccgcccatcccgcccctaactccgcccagttccgcccattctccgccccatggctgactaattttttttatttatgcagaggccgaggccgcctcggcctctgagctattccagaagtagtgaggaggcttttttggaggccatcggatcccgggcccgtcgactgcagaggcctgcatgcaagcttggtgtaatcatggtcatagctgtttcctgtgtgaaattgttatccgctcacaattccacacaacatacgagccggaagcataaagtgtaaagcctggggtgcctaatgagtgagctaactcacattaattgcgttgcgctcactgcccgctttccagtcgggaaacctgtcgtgccagctgcattaatgaatcggccaacgcgcggggagaggcggtttgcgtattgggcgctcttccgcttcctcgctcactgactcgctgcgctcggtcgttcggctgcggcgagcggtatcagctcactcaaaggcggtaatacggttatccacagaatcaggggataacgcaggaaagaacatgtgagcaaaaggccagcaaaaggccaggaaccgtaaaaaggccgcgttgctggcgtttttccataggctccgcccccctgacgagcatcacaaaaatcgacgctcaagtcagaggtggcgaaacccgacaggactataaagataccaggcgtttccccctggaagctccctcgtgcgctctcctgttccgaccctgccgcttaccggatacctgtccgcctttctcccttcgggaagcgtggcgctttctcatagctcacgctgtaggtatctcagttcggtgtaggtcgttcgctccaagctgggctgtgtgcacgaaccccccgttcagcccgaccgctgcgccttatccggtaactatcgtcttgagtccaacccggtaagacacgacttatcgccactggcagcagccactggtaacaggattagcagagcgaggtatgtaggcggtgctacagagttcttgaagtggtggcctaactacggctacactagaagaacagtatttggtatctgcgctctgctgaagccagttaccttcggaaaaagagttggtagctcttgatccggcaaacaaaccaccgctggtagcggtggtttttttgtttgcaagcagcagattacgcgcagaaaaaaaggatctcaagaagatcctttgatcttttctacggggtctgacgctcagtggaacgaaaactcacgttaagggattttggtcatgagattatcaaaaaggatcttcacctagatccttttaaattaaaaatgaagttttaaatcaagcccaatctgaataatgttacaaccaattaaccaattctgattagaaaaactcatcgagcatcaaatgaaactgcaatttattcatatcaggattatcaataccatatttttgaaaaagccgtttctgtaatgaaggagaaaactcaccgaggcagttccataggatggcaagatcctggtatcggtctgcgattccgactcgtccaacatcaatacaacctattaatttcccctcgtcaaaaataaggttatcaagtgagaaatcaccatgagtgacgactgaatccggtgagaatggcaaaagtttatgcatttctttccagacttgttcaacaggccagccattacgctcgtcatcaaaatcactcgcatcaaccaaaccgttattcattcgtgattgcgcctgagcgagacgaaatacgcgatcgctgttaaaaggacaattacaaacaggaatcgaatgcaaccggcgcaggaacactgccagcgcatcaacaatattttcacctgaatcaggatattcttctaatacctggaatgctgtttttccggggatcgcagtggtgagtaaccatgcatcatcaggagtacggataaaatgcttgatggtcggaagaggcataaattccgtcagccagtttagtctgaccatctcatctgtaacatcattggcaacgctacctttgccatgtttcagaaacaactctggcgcatcgggcttcccatacaagcgatagattgtcgcacctgattgcccgacattatcgcgagcccatttatacccatataaatcagcatccatgttggaatttaatcgcggcctcgacgtttcccgttgaatatggctcataacaccccttgtattactgtttatgtaagcagacagttttattgttcatgatgatatatttttatcttgtgcaatgtaacatcagagattttgagacacgggccagagctgca

SEQ ID NO: 2642 - DNA, 9289 bp, synthetic construct
  source 1..9289: mol_type = other DNA
tcgcgcgtttcggtgatgacggtgaaaacctctgacacatgcagctcccggagacggtcacagcttgtctgtaagcggatgccgggagcagacaagcccgtcagggcgcgtcagcgggtgttggcgggtgtcggggctggcttaactatgcggcatcagagcagattgtactgagagtgcaccatatgcggtgtgaaataccgcacagatgcgtaaggagaaaataccgcatcaggcgccattcgccattcaggctgcgcaactgttgggaagggcgatcggtgcgggcctcttcgctattacgccagctggcgaaagggggatgtgctgcaaggcgattaagttgggtaacgccagggttttcccagtcacgacgttgtaaaacgacggccagagaattcgagctcggtacctcgcgaatacatctagatatggttggctccggtgcccgtcagtgggcagagcgcacatcgcccacagtccccgagaagttgtggggaggggtcggcaattgaaccggtgcctagagaaggtggcgcggggtaaactgggaaagtgatgtcgtgtactggctccgcctttttcccgagggtgggggagaaccgtatataagtgcagtagtcgccgtgaacgttctttttcgcaacgggtttgccgccagaacacaggtaagtgccgtgtgtggttcccgcgggcctggcctctttacgggttatggcccttgcgtgccttgaattacttccacctggctgcagtacgtgattcttgatcccgagcttcgggttggaagtgggtgggagagttcgaggccttgcgcttaaggagccccttcgcctcgtgcttgagttgaggcctggcctgggcgctggggccaccgcgtgcgaatctggtggcaccttcgcgcctgtctcgctgctttcgataagtctctagccatttaaaatttttgatgacctgctgcgacgctttttttctggcaagatagtcttgtaaatgcgggccaagatctgcacactggtatttcggtttttggggccgcgggcggcgacggggcccgtgcgtcccagcgcacatgttcggcgaggcggggcctgcgagcgcggccaccgagaatcggacgggggtagtctcaagctggccggcctgctctggtgcctggcctcgcgccgccgtgtatcgccccgccctgggcggcaaggctggcccggtcggcaccagttgcgtgagcggaaagatggccgcttcccggccctgctgcagggagctcaaaatggaggacgcggcgctcgggagagcgggcgggtgagtcacccacacaaaggaaaagggcctttccgtcctcagccgtcgcttcatgtgactccacggagtaccgggcgccgtccaggcacctcgattagttctcgagcttttggagtacgtcgtctttaggttggggggaggggttttatgcgatggagtttccccacactgagtgggtggagactgaagttaggccagcttggcacttgatgtaattctccttggaatttgccctttttgagtttggatcttggttcattctcaagcctcagacagtggttcaaagtttttttcttccatttcaggtgagtttatgccgctagacggaggacgcacagctactgctgcgacctgaacttgggcgggtgccgaagatgagcaaacaactaaaaccaactttatacaaagacaaatcattggaattacaatggctaaacaacatttttagctctcacgacctgtgctgcggctgcaacgatccagttttacatttactgattttaattaacaaaaccggagaagcacctaaaccagaagaagacattaaaaatataaaatgcctccttactggcgccaaaaatactaccgaagaagatatagacctttctcctggagaactagaagaattattcaaagaagaaaaagatggagataccgcaaaccaagaaaaacatactggagaagaaaactgcgggtaagaaaacgtttttataaaagaaagttaaaaaaaattgtacttaaacagtttcaaccaaaaattattagaagatgtacaatatttggaacaatctgcctatttcaaggctctccagaaagagccaacaataattatattcaaacaatctactcctacgtaccagataaagaaccaggaggagggggatggactttaataactgaaagcttaagtagtttatgggaagactgggaacatttaaaaaatgtatggactcaaagtaacgctggtttaccacttgtaagatacgggggagtaacattatacttttatcaatctgcctatactgactatattgctcaagttttcaactgttatcctatgacagacacaaaatacacacatgcagactcagcaccaaacagaatgttattaaaaaaacatgtaataagagtacctagcagagaaacacgcaaaaaaagaaagccatacaaaagagttagagtaggacctccttctcaaatgcaaaacaaatggtactttcaaagagacatatgtgaaataccattaataatgattgcagccacagccgttgactttagatatcccttttgtgcaagcgactgtgctagtaacaacttaactctaacatgtttaaacccactattgtttcaaaaccaagactttgaccacccatccgatacacaaggctactttccaaaacctggagtatatctatactcaacacaaagaagtaacaagccaagttcttcagactgtatatacttaggaaacacaaaagacaatcaagaaggtaaatctgcaagtagtctaatgactctaaaaacacaaaaaataacagattggggaaatccattttggcattattatatagacggttctaaaaaaatattttcttactttaaacccccatcacaattagacagcagcgactttgaacacatgacagaattagcagaaccaatgtttatacaagttagatacaacccagaaagagacacaggacaaggaaacttaatatacgtaacagaaaactttagaggacaacactgggaccctccatctagtgacaacctaaaattagatggatttcccttatatgacatgtgctggggtttcatagactggatagaaaaagttcatgaaacagaaaacttacttaccaactactgcttctgtattagaagcagcgctttcaatgaaaaaaaaacagtttttatacctgtagatcattcatttttaacaggttttagcccatatgaaactccagttaaatcatcagaccaagctcactggcacccacaaataagatttcaaacaaaatcaataaatgacatttgtttaacaggccccggttgtgctaggtccccatatggcaattacatgcaggcaaaaatgagttataaatttcatgtaaaatggggaggatgtccaaaaacttatgaaaaaccatatgatccttgttcacagcccaattggactattccccataacctcaatgaaacaatacaaatccagaatccaaacacatgcccacaaacagaactccaagaatgggactggcgacgtgatattgttacaaaaaaagctatcgaaagaattagacaacacacggaacctcatgaaactttgcaaatctctacaggttccaaacacaacccaccagtacacagacaaacatcaccgtggacggactcagaaacggactcggaagaggaaaaagaccaaacacaagagatccagatccagctcaacaagctcagaaagcatcaacagcatctcaagcagcagctcaagcagtacctgaaaccccaaaatatagaatagttgcaagcaacataaaagttgaactttttcctactaaaaaaccttttaaaaacagacgctttactccttctgaaagagaaacagaaagacaatgtgctaaagctttttgtagaccagaaagacatttcttttatgatcctcctttttacccttactgtgtacctgaacctattgtaaactttgctttgggatataaaatttaataaaatgaatgcaattgttgttgttaacggggatcctcatcgcggccgctacgtaaattccgccccccccccccctctccctcccccccccctaacgttactggccgaagccgcttggaataaggccggtgtgcgtttgtctatatgttattttccaccatattgccgtcttttggcaatgtgagggcccggaaacctggccctgtcttcttgacgagcattcctaggggtctttcccctctcgccaaaggaatgcaaggtctgttgaatgtcgtgaaggaagcagttcctctggaagcttcttgaagacaaacaacgtctgtagcgaccctttgcaggcagcggaaccccccacctggcgacaggtgcctctgcggccaaaagccacgtgtataagatacacctgcaaaggcggcacaaccccagtgccacgttgtgagttggatagttgtggaaagagtcaaatggctctcctcaagcgtattcaacaaggggctgaaggatgcccagaaggtaccccattgtatgggatctgatctggggcctcggtgcacatgctttacatgtgtttagtcgaggttaaaaaaacgtctaggccccccgaaccacggggacgtggttttcctttgaaaaacacgatgataatatggccacaaccatggataaagttttaaacagagaggaatctttgcagctaatggaccttctaggtcttgaaaggagtgcctgggggaatattcctctgatgagaaaggcatatttaaaaaaatgcaaggagtttcatcctgataaaggaggagatgaagaaaaaatgaagaaaatgaatactctgtacaagaaaatggaagatggagtaaaatatgctcatcaacctgactttggaggcttctgggatgcaactgagattccaacctatggaactgatgaatgggagcagtggtggaatgcctttaatgaggaaaacctgttttgctcagaagaaatgccatctagtgatgatgaggctactgctgactctcaacattctactcctccaaaaaagaagagaaaggtagaagaccccaaggactttccttcagaattgctaagttttttgagtcatgctgtgtttagtaatagaactcttgcttgctttgctatttacaccacaaaggaaaaagctgcactgctatacaagaaaattatggaaaaatattctgtaacctttataagtaggcataacagttataatcataacatactgttttttcttactccacacaggcatagagtgtctgctattaataactatgctcaaaaattgtgtacctttagctttttaatttgtaaaggggttaataaggaatatttgatgtatagtgccttgactagagatccattttctgttattgaggaaagtttgccaggtgggttaaaggagcatgattttaatccagaagaagcagaggaaactaaacaagtgtcctggaagcttgtaacagagtatgcaatggaaacaaaatgtgatgatgtgttgttattgcttgggatgtacttggaatttcagtacagttttgaaatgtgtttaaaatgtattaaaaaagaacagcccagccactataagtaccatgaaaagcattatgcaaatgctgctatatttgctgacagcaaaaaccaaaaaaccatatgccaacaggctgttgatactgttttagctaaaaagcgggttgatagcctacaattaactagagaacaaatgttaacaaacagatttaatgatcttttggataggatggatataatgtttggttctacaggctctgctgacatagaagaatggatggctggagttgcttggctacactgtttgttgcccaaaatggattcagtggtgtatgactttttaaaatgcatggtgtacaacattcctaaaaaaagatactggctgtttaaaggaccaattgatagtggtaaaactacattagcagctgctttgcttgaattatgtggggggaaagctttaaatgttaatttgcccttggacaggctgaactttgagctaggagtagctattgaccagtttttagtagtttttgaggatgtaaagggcactggaggggagtccagagatttgccttcaggtcagggaattaataacctggacaatttaagggattatttggatggcagtgttaaggtaaacttagaaaagaaacacctaaataaaagaactcaaatatttccccctggaatagtcaccatgaatgagtacagtgtgcctaaaacactgcaggccagatttgtaaaacaaatagattttaggcccaaagattatttaaagcattgcctggaacgcagtgagtttttgttagaaaagagaataattcaaagtggcattgctttgcttcttatgttaatttggtacagacctgtggctgagtttgctcaaagtattcagagcagaattgtggagtggaaagagagattggacaaagagtttagtttgtcagtgtatcaaaaaatgaagtttaatgtggctatgggaattggagttttagattggctaagaaacagtgatgatgatgatgaagacagccaggaaaatgctgataaaaatgaagatggtggggagaagaacatggaagactcagggcatgaaacaggcattgattcacagtcccaaggctcatttcaggcccctcagtcctcacagtctgttcatgatcataatcagccataccacatttgtagaggttttacttgctttaaaaaacctcccacacctccccctgaacctgaaacataataagcttgcggccgcttcgagcagacatgataagatacattgatgagtttggacaaaccacaactagaatgcagtgaaaaaaatgctttatttgtgaaatttgtgatgctattgctttatttgtaaccattataagctgcaataaacaagtttcatgtctggctctagctatcccgcccctaactccgcccatcccgcccctaactccgcccagttccgcccattctccgccccatggctgactaattttttttatttatgcagaggccgaggccgcctcggcctctgagctattccagaagtagtgaggaggcttttttggaggccatcggatcccgggcccgtcgactgcagaggcctgcatgcaagcttggtgtaatcatggtcatagctgtttcctgtgtgaaattgttatccgctcacaattccacacaacatacgagccggaagcataaagtgtaaagcctggggtgcctaatgagtgagctaactcacattaattgcgttgcgctcactgcccgctttccagtcgggaaacctgtcgtgccagctgcattaatgaatcggccaacgcgcggggagaggcggtttgcgtattgggcgctcttccgcttcctcgctcactgactcgctgcgctcggtcgttcggctgcggcgagcggtatcagctcactcaaaggcggtaatacggttatccacagaatcaggggataacgcaggaaagaacatgtgagcaaaaggccagcaaaaggccaggaaccgtaaaaaggccgcgttgctggcgtttttccataggctccgcccccctgacgagcatcacaaaaatcgacgctcaagtcagaggtggcgaaacccgacaggactataaagataccaggcgtttccccctggaagctccctcgtgcgctctcctgttccgaccctgccgcttaccggatacctgtccgcctttctcccttcgggaagcgtggcgctttctcatagctcacgctgtaggtatctcagttcggtgtaggtcgttcgctccaagctgggctgtgtgcacgaaccccccgttcagcccgaccgctgcgccttatccggtaactatcgtcttgagtccaacccggtaagacacgacttatcgccactggcagcagccactggtaacaggattagcagagcgaggtatgtaggcggtgctacagagttcttgaagtggtggcctaactacggctacactagaagaacagtatttggtatctgcgctctgctgaagccagttaccttcggaaaaagagttggtagctcttgatccggcaaacaaaccaccgctggtagcggtggtttttttgtttgcaagcagcagattacgcgcagaaaaaaaggatctcaagaagatcctttgatcttttctacggggtctgacgctcagtggaacgaaaactcacgttaagggattttggtcatgagattatcaaaaaggatcttcacctagatccttttaaattaaaaatgaagttttaaatcaagcccaatctgaataatgttacaaccaattaaccaattctgattagaaaaactcatcgagcatcaaatgaaactgcaatttattcatatcaggattatcaataccatatttttgaaaaagccgtttctgtaatgaaggagaaaactcaccgaggcagttccataggatggcaagatcctggtatcggtctgcgattccgactcgtccaacatcaatacaacctattaatttcccctcgtcaaaaataaggttatcaagtgagaaatcaccatgagtgacgactgaatccggtgagaatggcaaaagtttatgcatttctttccagacttgttcaacaggccagccattacgctcgtcatcaaaatcactcgcatcaaccaaaccgttattcattcgtgattgcgcctgagcgagacgaaatacgcgatcgctgttaaaaggacaattacaaacaggaatcgaatgcaaccggcgcaggaacactgccagcgcatcaacaatattttcacctgaatcaggatattcttctaatacctggaatgctgtttttccggggatcgcagtggtgagtaaccatgcatcatcaggagtacggataaaatgcttgatggtcggaagaggcataaattccgtcagccagtttagtctgaccatctcatctgtaacatcattggcaacgctacctttgccatgtttcagaaacaactctggcgcatcgggcttcccatacaagcgatagattgtcgcacctgattgcccgacattatcgcgagcccatttatacccatataaatcagcatccatgttggaatttaatcgcggcctcgacgtttcccgttgaatatggctcataacaccccttgtattactgtttatgtaagcagacagttttattgttcatgatgatatatttttatcttgtgcaatgtaacatcagagattttgagacacgggccagagctgca

SEQ ID NO: 2643 - DNA, 8635 bp, synthetic construct
  source 1..8635: mol_type = other DNA
tttccataggctccgcccccctgacgagcatcacaaaaatcgacgctcaagtcagaggtggcgaaacccgacaggactataaagataccaggcgtttccccctggaagctccctcgtgcgctctcctgttccgaccctgccgcttaccggatacctgtccgcctttctcccttcgggaagcgtggcgctttctcatagctcacgctgtaggtatctcagttcggtgtaggtcgttcgctccaagctgggctgtgtgcacgaaccccccgttcagcccgaccgctgcgccttatccggtaactatcgtcttgagtccaacccggtaagacacgacttatcgccactggcagcagccactggtaacaggattagcagagcgaggtatgtaggcggtgctacagagttcttgaagtggtggcctaactacggctacactagaagaacagtatttggtatctgcgctctgctgaagccagttaccttcggaaaaagagttggtagctcttgatccggcaaacaaaccaccgctggtagcggtggtttttttgtttgcaagcagcagattacgcgcagaaaaaaaggatctcaagaagatcctttgatcttttctacggggtctgacgctcagtggaacgaaaactcacgttaagggattttggtcatgagattatcaaaaaggatcttcacctagatccttttaaattaaaaatgaagttttaaatcaagcccaatctgaataatgttacaaccaattaaccaattctgattagaaaaactcatcgagcatcaaatgaaactgcaatttattcatatcaggattatcaataccatatttttgaaaaagccgtttctgtaatgaaggagaaaactcaccgaggcagttccataggatggcaagatcctggtatcggtctgcgattccgactcgtccaacatcaatacaacctattaatttcccctcgtcaaaaataaggttatcaagtgagaaatcaccatgagtgacgactgaatccggtgagaatggcaaaagtttatgcatttctttccagacttgttcaacaggccagccattacgctcgtcatcaaaatcactcgcatcaaccaaaccgttattcattcgtgattgcgcctgagcgagacgaaatacgcgatcgctgttaaaaggacaattacaaacaggaatcgaatgcaaccggcgcaggaacactgccagcgcatcaacaatattttcacctgaatcaggatattcttctaatacctggaatgctgtttttccggggatcgcagtggtgagtaaccatgcatcatcaggagtacggataaaatgcttgatggtcggaagaggcataaattccgtcagccagtttagtctgaccatctcatctgtaacatcattggcaacgctacctttgccatgtttcagaaacaactctggcgcatcgggcttcccatacaagcgatagattgtcgcacctgattgcccgacattatcgcgagcccatttatacccatataaatcagcatccatgttggaatttaatcgcggcctcgacgtttcccgttgaatatggctcataacaccccttgtattactgtttatgtaagcagacagttttattgttcatgatgatatatttttatcttgtgcaatgtaacatcagagattttgagacacgggccagagctgcatcgcgcgtttcggtgatgacggtgaaaacctctgacacatgcagctcccggacgtcattgtcgatatggcgtctctcggtatggttggctccggtgcccgtcagtgggcagagcgcacatcgcccacagtccccgagaagttgtggggaggggtcggcaattgaaccggtgcctagagaaggtggcgcggggtaaactgggaaagtgatgtcgtgtactggctccgcctttttcccgagggtgggggagaaccgtatataagtgcagtagtcgccgtgaacgttctttttcgcaacgggtttgccgccagaacacaggtaagtgccgtgtgtggttcccgcgggcctggcctctttacgggttatggcccttgcgtgccttgaattacttccacctggctgcagtacgtgattcttgatcccgagcttcgggttggaagtgggtgggagagttcgaggccttgcgcttaaggagccccttcgcctcgtgcttgagttgaggcctggcctgggcgctggggccgccgcgtgcgaatctggtggcaccttcgcgcctgtctcgctgctttcgataagtctctagccatttaaaatttttgatgacctgctgcgacgctttttttctggcaagatagtcttgtaaatgcgggccaagatctgcacactggtatttcggtttttggggccgcgggcggcgacggggcccgtgcgtcccagcgcacatgttcggcgaggcggggcctgcgagcgcggccaccgagaatcggacgggggtagtctcaagctggccggcctgctctggtgcctggcctcgcgccgccgtgtatcgccccgccctgggcggcaaggctggcccggtcggcaccagttgcgtgagcggaaagatggccgcttcccggccctgctgcagggagctcaaaatggaggacgcggcgctcgggagagcgggcgggtgagtcacccacacaaaggaaaagggcctttccgtcctcagccgtcgcttcatgtgactccacggagtaccgggcgccgtccaggcacctcgattagttctcgagcttttggagtacgtcgtctttaggttggggggaggggttttatgcgatggagtttccccacactgagtgggtggagactgaagttaggccagcttggcacttgatgtaattctccttggaatttgccctttttgagtttggatcttggttcattctcaagcctcagacagtggttcaaagtttttttcttccatttcaggtggatgtttatcacgccagacggagacggcatcacttcagtgactgcaggctgatcttgggcgggagccgaaggtgagtgaaaccaccgtagtctaggggcaattcgggctagatcagtctggcggaccgggcaagaaacttaaaataatacctattattttattacagatgaccacaaaatctccatcaagaagagaattaaatcaactaattaatgtatgttgcggagcccacgacctgatctgcgactgcgacgaaccaactaaacacataatccttcacttattttcacacggagaaccctactttgtcaccaccgaacagaaaaacaacatcacaaaatgccttattacagacgacaccgctggcaatacaacccatacacccgctggagacgacgctattggagacggcgacctagaaaaacttttcgcagaagatactttccaagaagaagacgccaaagggtaagaagaaaatttaaatacttaaaacttaaagaatggcagccaaaaactattaaaaaatgctgcattaaaggaatgcatcctatatttataacaagcgcaggatccatcagtagaaactatagaatgtatgaacacagcttcactccagaaagatggccaaccggaggaggcttttctgtaactaaatataacttagatggactatatgaacaacatagccttaacagaaactggtggactactagtaatcaaaccttaccacttgtaagatatttaggatgtaaactaaaattttaccaaagctggtcagcagactatgtagttaactggtataataattttcctatgacagcaactcaattattatatgaatcttgtcaacctagcttaatgatgatgaataaaaacaaattaatagtacccagcaaactaacacaacacagaaaaagaccctatgtaacacttagactacccccaccagcacagatgtcaaaccgttggttttttgcaagagatcttgctaaagtaggtttagcaatgttaacagtttcatgttgctcactagacaattactacataggaagcaaccaacagtcaaataatatttcttttatatctttaaacacatacttttggcaaaaacataacttccaacaaccatccataagaggatacagcccgtacacatcaggaacaatagaaaaacacatatggtttacacctgaaaccacagaagtagacaaattaaaaccaacaaatttcatactattaggaaccactaaagaaaaccaagacggacaacacatatcacaatcaaacaaaaacacatactttacaaaccataaattttggggaaacccatttaaacatgattactttactggagccagcaaactttacgtatcaactaaaagctggacagaaataactgcaaaaatggcacaaatagacacagatatcggtgcaggaatactaacagaaccatcaaatccactaaccaacatatgcagatatgcaccagacagagacacaggagaaggaaacaaactatacttaaaaagcaccataagagacgaatctggttgggaacccccaacagacgaagatcttatagcagaaggctttccactatggatactagcctttggattcttagactggcataaaaaactaggcacagcaacaaacttagacagatcatgggtagcagtaatacaatctaactttataagcccacaactaccatattatgtacctttagaccaatacttttatgaaggaacatcaccatatgaaagaacagatgagccacacattaatgatgaagataacaaaaattggtttccatgtacaaaataccaacaagaaacactaaacaatttagcttcctgtggaccaggtatttatagatttggagacagaaaaacagtagaaggaaaactaaaataccaattttactttaagtttggaggatgtgcaccaaagatggacacaattagagatcctactaaacaagaagtatatcccatccccaattgtcagcattccacatattcgttacagaatccaagcatgcctccagaatccctactctggcaattcgacgtctacaaagacatccttacaagtaaagctacaaaaagaattggaaaagatttctcatctaaaaaaactgtattcacagatcaaagtgccatgcagccaacagccagcacagcagcagaaagcgactcatcggaagaaacaccggactcggaagaagagaagacgacactactcttcaagtacaaacagcagcgaagaaagcgaaaatggctggagcaccagctccagcaactagtgtatcaaccataaaattcaaatgtgtaaaaactgtaaaactatttgaaagccctcagagaaatagaaaaatgaacaaatatgaactagcccatgacttagaagcagcaaaagcatttatgagactgccttgtacatatttgcttgaaaaaccttactacccctggctctttcaaaaacatgacaattataatgtaaactttgacttaaactaccagtaataacttgtacaaagtggtacgcgtgaagttccccctctccctcccccccccctaacgttactggccgaagccgcttggaataaggccggtgtgcgtttgtctatatgttattttccaccatattgccgtcttttggcaatgtgagggcccggaaacctggccctgtcttcttgacgagcattcctaggggtctttcccctctcgccaaaggaatgcaaggtctgttgaatgtcgtgaaggaagcagttcctctggaagcttcttgaagacaaacaacgtctgtagcgaccctttgcaggcagcggaaccccccacctggcgacaggtgcctctgcggccaaaagccacgtgtataagatacacctgcaaaggcggcacaaccccagtgccacgttgtgagttggatagttgtggaaagagtcaaatggctctcctcaagcgtattcaacaaggggctgaaggatgcccagaaggtaccccattgtatgggatctgatctggggcctcggtgcacatgctttacatgtgtttagtcgaggttaaaaaaacgtctaggccccccgaaccacggggacgtggttttcctttgaaaaacacgatgataatatggccacaaccatggataaagttttaaacagagaggaatctttgcagctaatggaccttctaggtcttgaaaggagtgcctgggggaatattcctctgatgagaaaggcatatttaaaaaaatgcaaggagtttcatcctgataaaggaggagatgaagaaaaaatgaagaaaatgaatactctgtacaagaaaatggaagatggagtaaaatatgctcatcaacctgactttggaggcttctgggatgcaactgagattccaacctatggaactgatgaatgggagcagtggtggaatgcctttaatgaggaaaacctgttttgctcagaagaaatgccatctagtgatgatgaggctactgctgactctcaacattctactcctccaaaaaagaagagaaaggtagaagaccccaaggactttccttcagaattgctaagttttttgagtcatgctgtgtttagtaatagaactcttgcttgctttgctatttacaccacaaaggaaaaagctgcactgctatacaagaaaattatggaaaaatattctgtaacctttataagtaggcataacagttataatcataacatactgttttttcttactccacacaggcatagagtgtctgctattaataactatgctcaaaaattgtgtacctttagctttttaatttgtaaaggggttaataaggaatatttgatgtatagtgccttgactagagatccattttctgttattgaggaaagtttgccaggtgggttaaaggagcatgattttaatccagaagaagcagaggaaactaaacaagtgtcctggaagcttgtaacagagtatgcaatggaaacaaaatgtgatgatgtgttgttattgcttgggatgtacttggaatttcagtacagttttgaaatgtgtttaaaatgtattaaaaaagaacagcccagccactataagtaccatgaaaagcattatgcaaatgctgctatatttgctgacagcaaaaaccaaaaaaccatatgccaacaggctgttgatactgttttagctaaaaagcgggttgatagcctacaattaactagagaacaaatgttaacaaacagatttaatgatcttttggataggatggatataatgtttggttctacaggctctgctgacatagaagaatggatggctggagttgcttggctacactgtttgttgcccaaaatggattcagtggtgtatgactttttaaaatgcatggtgtacaacattcctaaaaaaagatactggctgtttaaaggaccaattgatagtggtaaaactacattagcagctgctttgcttgaattatgtggggggaaagctttaaatgttaatttgcccttggacaggctgaactttgagctaggagtagctattgaccagtttttagtagtttttgaggatgtaaagggcactggaggggagtccagagatttgccttcaggtcagggaattaataacctggacaatttaagggattatttggatggcagtgttaaggtaaacttagaaaagaaacacctaaataaaagaactcaaatatttccccctggaatagtcaccatgaatgagtacagtgtgcctaaaacactgcaggccagatttgtaaaacaaatagattttaggcccaaagattatttaaagcattgcctggaacgcagtgagtttttgttagaaaagagaataattcaaagtggcattgctttgcttcttatgttaatttggtacagacctgtggctgagtttgctcaaagtattcagagcagaattgtggagtggaaagagagattggacaaagagtttagtttgtcagtgtatcaaaaaatgaagtttaatgtggctatgggaattggagttttagattggctaagaaacagtgatgatgatgatgaagacagccaggaaaatgctgataaaaatgaagatggtggggagaagaacatggaagactcagggcatgaaacaggcattgattcacagtcccaaggctcatttcaggcccctcagtcctcacagtctgttcatgatcataatcagccataccacatttgtagaggttttacttgctttaaaaaacctcccacacctccccctgaacctgaaacataataagcttgcggccgcttcgagcagacatgataagatacattgatgagtttggacaaaccacaactagaatgcagtgaaaaaaatgctttatttgtgaaatttgtgatgctattgctttatttgtaaccattataagctgcaataaacaagtttcatgtctggctctagctatcccgcccctaactccgcccatcccgcccctaactccgcccagttccgcccattctccgccccatggctgactaattttttttatttatgcagaggccgaggccgcctcggcctctgagctattccagaagtagtgaggaggcttttttggaggcctgaatctgtgagacgtatcattgtcacatgtgagcaaaaggccagcaaaaggccaggaaccgtaaaaaggccgcgttgctggcgtt

SEQ ID NO: 2644 - protein, 90 aa, synthetic construct
ERVESQSAETVLTPDECQLLGYLDKGKRKRKEKAGSLQWAYMAIARLGGFMDSKRTGIASWGALWGWEALQSKLDGFLAAKDLMAQGIKL

SEQ ID NO: 2645 - protein, 264 aa, synthetic construct
MIEQDGLHAGSPAAWVERLFGYDWAQQTIGCSDAAVFRLSAQGRPVLFVKTDLSGALNELQDEAARLSWLATTGVPCAAVLDVVTEAGRDWLLLGEVPGQDLLSSHLAPAEKVSIMADAMRRLHTLDPATCPFDHQAKHRIERARTRMEAGLVDQDDLDEEHQGLAPAELFARLKASMPDGEDLVVTHGDACLPNIMVENGRFSGFIDCGRLGVADRYQDIALATRDIAEELGGEWADRFLVLYGIAAPDSQRIAFYRLLDEFF

SEQ ID NO: 2646 - protein, 4 aa, synthetic construct
IEGR

SEQ ID NO: 2647 - protein, 96 aa, synthetic construct
IASVAQHVCLSPSRLSHLFRQQLGISVLSWREDQRISQAKLLLSTTRMPIATVGRNVGFDDQLYFSRVFKKCTGASPSEFRAGCEEKVNDVAVKLS

SEQ ID NO: 2648 - protein, 13 aa, synthetic construct
AASRVSVMTVKTS

SEQ ID NO: 2649 - DNA, 2869 bp, synthetic construct
  source 1..2869: mol_type = other DNA
ggctccccgggcgcgcacctgcatcgaaaaaggccagcattaattcacttaaggagtctgtttatttaagttaaaccttaataaacggtcaccgcctccctaatacgcaggcgcagaaagggggctccgccccctttaacccccagggggctccgccccctgaaacccccaagggggctacgcccccttacaccccctaataaatattcaacaggaaaaccacctaatttaaattgccgaccacaaaccgtcacttagttcccctttttgcaacaacttctgcttttttccaactgccggaaaaccacataatttgcatggctaaccacaaactgatatgctaattaacttccacaaaacaacttccccttttaaaaccacacctacaaattaattattaaacacagtcacatcctgggaggtactaccacactataataccaagtgcacttccgaatggctgagtttatgccgctagacggagaacgcatcagttactgactgcggactgaacttgggcgggtgccgaaggtgagtgaaaccaccgaagtcaaggggcaattcgggctagttcagtctagcggaacgggcaagaaacttaaaattattttatttttcagcggtcctcagcctagttattaatagtaatcaattacggggtcattagttcatagcccatatatggagttccgcgttacataacttacggtaaatggcccgcctggctgaccgcccaacgacccccgcccattgacgtcaataatgacgtatgttcccatagtaacgccaatagggactttccattgacgtcaatgggtggagtatttacggtaaactgcccacttggcagtacatcaagtgtatcatatgccaagtacgccccctattgacgtcaatgacggtaaatggcccgcctggcattatgcccagtacatgaccttatgggactttcctacttggcagtacatctacgtattagtcatcgctattaccatggtgatgcggttttggcagtacatcaatgggcgtggatagcggtttgactcacggggatttccaagtctccaccccattgacgtcaatgggagtttgttttggcaccaaaatcaacgggactttccaaaatgtcgtaacaactccgccccattgacgcaaatgggcggtaggcgtgtacggtgggaggtctatataagcagagctctctggctaactggatctacaaaacctcagcaagcagatccaccggtcgccaccatggtgagcaagggcgaggagctgttcaccggggtggtgcccatcctggtcgagctggacggcgacgtaaacggccacaagttcagcgtgtccggcgagggcgagggcgatgccacctacggcaagctgaccctgaagttcatctgcaccaccggcaagctgcccgtgccctggcccaccctcgtgaccaccctgacctacggcgtgcagtgcttcagccgctaccccgaccacatgaagcagcacgacttcttcaagtccgccatgcccgaaggctacgtccaggagcgcaccatcttcttcaaggacgacggcaactacaagacccgcgccgaggtgaagttcgagggcgacaccctggtgaaccgcatcgagctgaagggcatcgacttcaaggaggacggcaacatcctggggcacaagctggagtacaactacaacagccacaacgtctatatcatggccgacaagcagaagaacggcatcaaggtgaacttcaagatccgccacaacatcgaggacggcagcgtgcagctcgccgaccactaccagcagaacacccccatcggcgacggccccgtgctgctgcccgacaaccactacctgagcacccagtccgccctgagcaaagaccccaacgagaagcgcgatcacatggtcctgctggagttcgtgaccgccgccgggatcactctcggcatggacgagctgtacaagtaataacctcagcaatcaacctctggattacaaaatttgtgaaagattgactggtattcttaactatgttgctccttttacgctatgtggatacgctgctttaatgcctttgtatcatgctattgcttcccgtatggctttcattttctcctccttgtataaatcctggttgctgtctctttatgaggagttgtggcccgttgtcaggcaacgtggcgtggtgtgcactgtgtttgctgacgcaacccccactggttggggcattgccaccacctgtcagctcctttccgggactttcgctttccccctccctattgccacggcggaactcatcgccgcctgccttgcccgctgctggacaggggctcggctgttgggcactgacaattccgtggtgttgtcggggaagctgacgtcctttccatggctgctcgcctgtgttgccacctggattctgcgcgggacgtccttctgctacgtcccttcggccctcaatccagcggaccttccttcccgcggcctgctgccggctctgcggcctcttccgcgtcttcgccttcgccctcagacgagtcggatctccctttgggccgcctccccgcctggttccctcagccgactgtgccttctagttgccagccatctgttgtttgcccctcccccgtgccttccttgaccctggaaggtgccactcccactgtcctttcctaataaaatgaggaaattgcatcgcattgtctgagtaggtgtcattctattctggggggtggggtggggcaggacagcaagggggaggattgggtagacaatagcaggcatgctggggatgcggtgggctctatggcctcagctctgaaaacgatgcaggtggggcccgccccaactggggtaacctttg

SEQ ID NO: 2650 - protein, 239 aa, synthetic construct
MVSKGEELFTGVVPILVELDGDVNGHKFSVSGEGEGDATYGKLTLKFICTTGKLPVPWPTLVTTLTYGVQCFSRYPDHMKQHDFFKSAMPEGYVQERTIFFKDDGNYKTRAEVKFEGDTLVNRIELKGIDFKEDGNILGHKLEYNYNSHNVYIMADKQKNGIKVNFKIRHNIEDGSVQLADHYQQNTPIGDGPVLLPDNHYLSTQSALSKDPNEKRDHMVLLEFVTAAGITLGMDELYK

SEQ ID NO: 2651 - DNA, 6879 bp, synthetic construct
  source 1..6879: mol_type = other DNA
tttccataggctccgcccccctgacgagcatcacaaaaatcgacgctcaagtcagaggtggcgaaacccgacaggactataaagataccaggcgtttccccctggaagctccctcgtgcgctctcctgttccgaccctgccgcttaccggatacctgtccgcctttctcccttcgggaagcgtggcgctttctcatagctcacgctgtaggtatctcagttcggtgtaggtcgttcgctccaagctgggctgtgtgcacgaaccccccgttcagcccgaccgctgcgccttatccggtaactatcgtcttgagtccaacccggtaagacacgacttatcgccactggcagcagccactggtaacaggattagcagagcgaggtatgtaggcggtgctacagagttcttgaagtggtggcctaactacggctacactagaaggacagtatttggtatctgcgctctgctgaagccagttaccttcggaaaaagagttggtagctcttgatccggcaaacaaaccaccgctggtagcggtggtttttttgtttgcaagcagcagattacgcgcagaaaaaaaggatctcaagaagatcctttgatcttttctacggggtctgacgctcagtggaacgaaaactcacgttaagggattttggtcatgagcggatacatatttgaatgtatttagaaaaataaacaaaagagtttgtagaaacgcaaaaaaggccatccgtcaggatggccttctgcttaatttgatgcctggcagtttatggcgggcgtcctgcccgccaccctccgggccgttgcttcgcaacgttcaaatccgctcccggcggatttgtcctactcaggagagcgttcaccgacaaacaacagataaaacgaaaggcccagtctttcgactgagcctttcgttttatttgatgcctggcagttccctactctcgcatggggagaccccacactaccatcggcgctacggcgtttcacttctgagttcggcatggggtcaggtgggaccaccgcgctactgccgccaggcaaattctgttttatcagaccgcttctgcgttctgatttaatctgtatcaggctgaaaatcttctctcatccgccaaaacagccaagctggagaccgtttggccccccctcgagcgcgtagaaagccagtccgcagaaacggtgctgaccccggatgaatgtcagctactgggctatctggacaagggaaaacgcaagcgcaaagagaaagcaggtagcttgcagtgggcttacatggcgatagctagactgggcggttttatggacagcaagcgaaccggaattgccagctggggcgccctctggtaaggttgggaagccctgcaaagtaaactggatggctttcttgccgccaaggatctgatggcgcaggggatcaagctctgatcaagagacaggatgaggatcgtttcgcatgattgaacaagatggattgcacgcaggttctccggccgcttgggtggagaggctattcggctatgactgggcacaacagacaatcggctgctctgatgccgccgtgttccggctgtcagcgcaggggcgcccggttctttttgtcaagaccgacctgtccggtgccctgaatgaactgcaagacgaggcagcgcggctatcgtggctggccacgacgggcgttccttgcgcagctgtgctcgacgttgtcactgaagcgggaagggactggctgctattgggcgaagtgccggggcaggatctcctgtcatctcaccttgctcctgccgagaaagtatccatcatggctgatgcaatgcggcggctgcatacgcttgatccggctacctgcccattcgaccaccaagcgaaacatcgcatcgagcgagcacgtactcggatggaagccggtcttgtcgatcaggatgatctggacgaagagcatcaggggctcgcgccagccgaactgttcgccaggctcaaggcgagcatgcccgacggcgaggatctcgtcgtgacccatggcgatgcctgcttgccgaatatcatggtggaaaatggccgcttttctggattcatcgactgtggccggctgggtgtggcggaccgctatcaggacatagcgttggctacccgtgatattgctgaagagcttggcggcgaatgggctgaccgcttcctcgtgctttacggtatcgccgctcccgattcgcagcgcatcgccttctatcgccttcttgacgagttcttctgaattattaactcgagatccactagagtgtggcggccgcattcttataatcagcatcatgatgtggtaccacatcatgatgctgattacccccaactgagagaactcaaaggttaccccagttggggcgggccccacctgcatcgttttcagagctgaggccatagagcccaccgcatccccagcatgcctgctattgtctacccaatcctcccccttgctgtcctgccccaccccaccccccagaatagaatgacacctactcagacaatgcgatgcaatttcctcattttattaggaaaggacagtgggagtggcaccttccagggtcaaggaaggcacgggggaggggcaaacaacagatggctggcaactagaaggcacagtcggctgagggaaccaggcggggaggcggcccaaagggagatccgactcgtctgagggcgaaggcgaagacgcggaagaggccgcagagccggcagcaggccgcgggaaggaaggtccgctggattgagggccgaagggacgtagcagaaggacgtcccgcgcagaatccaggtggcaacacaggcgagcagccatggaaaggacgtcagcttccccgacaacaccacggaattgtcagtgcccaacagccgagcccctgtccagcagcgggcaaggcaggcggcgatgagttccgccgtggcaatagggagggggaaagcgaaagtcccggaaaggagctgacaggtggtggcaatgccccaaccagtgggggttgcgtcagcaaacacagtgcacaccacgccacgttgcctgacaacgggccacaactcctcataaagagacagcaaccaggatttatacaaggaggagaaaatgaaagccatacgggaagcaatagcatgatacaaaggcattaaagcagcgtatccacatagcgtaaaaggagcaacatagttaagaataccagtcaatctttcacaaattttgtaatccagaggttgattgctgaggttattacttgtacagctcgtccatgccgagagtgatcccggcggcggtcacgaactccagcaggaccatgtgatcgcgcttctcgttggggtctttgctcagggcggactgggtgctcaggtagtggttgtcgggcagcagcacggggccgtcgccgatgggggtgttctgctggtagtggtcggcgagctgcacgctgccgtcctcgatgttgtggcggatcttgaagttcaccttgatgccgttcttctgcttgtcggccatgatatagacgttgtggctgttgtagttgtactccagcttgtgccccaggatgttgccgtcctccttgaagtcgatgcccttcagctcgatgcggttcaccagggtgtcgccctcgaacttcacctcggcgcgggtcttgtagttgccgtcgtccttgaagaagatggtgcgctcctggacgtagccttcgggcatggcggacttgaagaagtcgtgctgcttcatgtggtcggggtagcggctgaagcactgcacgccgtaggtcagggtggtcacgagggtgggccagggcacgggcagcttgccggtggtgcagatgaacttcagggtcagcttgccgtaggtggcatcgccctcgccctcgccggacacgctgaacttgtggccgtttacgtcgccgtccagctcgaccaggatgggcaccaccccggtgaacagctcctcgcccttgctcaccatggtggcgaccggtggatctgcttgctgaggttttgtagatccagttagccagagagctctgcttatatagacctcccaccgtacacgcctaccgcccatttgcgtcaatggggcggagttgttacgacattttggaaagtcccgttgattttggtgccaaaacaaactcccattgacgtcaatggggtggagacttggaaatccccgtgagtcaaaccgctatccacgcccattgatgtactgccaaaaccgcatcaccatggtaatagcgatgactaatacgtagatgtactgccaagtaggaaagtcccataaggtcatgtactgggcataatgccaggcgggccatttaccgtcattgacgtcaatagggggcgtacttggcatatgatacacttgatgtactgccaagtgggcagtttaccgtaaatactccacccattgacgtcaatggaaagtccctattggcgttactatgggaacatacgtcattattgacgtcaatgggcgggggtcgttgggcggtcagccaggcgggccatttaccgtaagttatgtaacgcggaactccatatatgggctatgaactaatgaccccgtaattgattactattaataactaggctgaggaccgctgtaaaataataatatttaagtttcttgcccgttccgccatactgaactagcccgaattgcccctagactacggtggttgcactcaccttcggctcccgcccaagttcagcctggagtcactgaagtgatcccgtcaccgtctggcggcataaactcagccattcggaagtgtagttagttatatagattgttagctcctccccggaattacagtgattattaattaatgtaatgaataataataagtaaaagaggaagtaagtgcaaaaaggagaagtaagtgacggtttgtggtcggcaattctaattaggtggttttcctgttgaatatttattagggggtgtaagggggcggagcccccttgggggtttaagggggcggagcccccttgggggtttaagggggcggagcccccttgtgcgcctgcgtatttgggagagtggtggatgtttatttaagttttatcttatataaatggacaccgagagtgaaagtttgcaggcgtagtttagcccttttcgatgcaggtgcgcgcccggggagcccaagggcacgccctggcaccgcggccgctgagtctcgaccatcatcatcatcatcattgagtttatctgggataacagggtaatgtcatctagggataacagggtatgtcatctgggataacagggtaatgtatctagggataacagggtaatgtcatctgggataacagggtaatgtcatctagggataacagggtatgtcatctgggataacagggtaatgtatctagggataacagggtaatgtcatctgggataacagggtaatgtcatctagggataacagggtatgtcatctgggataacagggtaatgtatctagggataacagggtaatgtcatctgggataacagggtaatgtcatctagggataacagggtatgtcatctgggataacagggtaatgtatctagggataacagggtaatgtcatctgggataacagggtaatgtcatctagggataacagggtatgtcatctgggataacagggtaatgtatctagggataacagggtaatgtcatctgggataacagggtaatgtcatctagggataacagggtatgtcatctgggataacagggtaatgtatctagggataacagggtaatgtcatctgggataacagggtaatgtcatctagggataacagggtatgtcatctgggataacagggtaatgtatctagggataacagggtaatgtcatctgggataacagggtaatgtcatctagggataacagggtatgtcatctgggataacagggtaatgtatctagggataacagggtaatgtcaaacggtctccagcttggctgttttggcggatgagagaagaatcgccagcgtcgcacagcatgtttgcttgtcgccgtcgcgtctgtcacatcttttccgccagcagttagggattagcgtcttaagctggcgcgaggaccaacgtatcagccaggcgaagctgcttttgagcaccacccggatgcctatcgccaccgtcggtcgcaatgttggttttgacgatcaactctatttctcgcgggtatttaaaaaatgcaccggggccagcccgagcgagttccgtgccggttgtgaagaaaaagtgaatgatgtagccgtcaagttgtcataattggtaacgaatcagacaattgacggcttgacggagtagcatagggtttgcagaatccctgcttcgtccatttgacaggcacattatgcatgccgcttcgccttcgcgcgcgaattgatctgctgcctcgcgcgtttcggtgatgacggtgaaaacctctgacacatgcagctcccggagacggtcacagcttgtctgtaagcggatgccgggagcagacaagcccgtcagggcgcgtcagcgggtgttggcgggtgtcggggcgcagccatgacccagtcacgtagcgatagcggagtgtatactggcttaactatgcggcatcagagcagattgtactgagagtgcaccatatgcggtgtgaaataccgcacagatgcgtaaggagaaaataccgcatcaggcgctcttccgcttcctcgctcactgactcgctgcgctcggtcgttcggctgcggcgagcggtatcagctcactcaaaggcggtaatacggttatccacagaatcaggggataacgcaggaaagaacatgtgagcaaaaggccagcaaaaggccaggaaccgtaaaaaggccgcgttgctggcgtt

SEQ ID NO: 2652 - DNA, 2797 bp, synthetic construct
  source 1..2797: mol_type = other DNA
ggctccccgggcgcgcacctgcatcgaaaagggctaaactacgcctgcaaactttcactctcggtgtccatttatataagataaaacttaaataaacatccaccactctcccaaatacgcaggcgcacaagggggctccgcccccttaaacccccaagggggctccgcccccttaaacccccaagggggctccgcccccttacaccccctaataaatattcaacaggaaaaccacctaattagaattgccgaccacaaaccgtcacttacttctcctttttgcacttacttcctcttttacttattattattcattacattaattaataatcactgtaattccggggaggagctaacaatctatataactaactacacttccgaatggctgagtttatgccgccagacggtgacgggatcacttcagtgactccaggctgaacttgggcgggagccgaaggtgagtgcaaccaccgtagtctaggggcaattcgggctagttcagtatggcggaacgggcaagaaacttaaatattattattttacagcggtcctcagcctagttattaatagtaatcaattacggggtcattagttcatagcccatatatggagttccgcgttacataacttacggtaaatggcccgcctggctgaccgcccaacgacccccgcccattgacgtcaataatgacgtatgttcccatagtaacgccaatagggactttccattgacgtcaatgggtggagtatttacggtaaactgcccacttggcagtacatcaagtgtatcatatgccaagtacgccccctattgacgtcaatgacggtaaatggcccgcctggcattatgcccagtacatgaccttatgggactttcctacttggcagtacatctacgtattagtcatcgctattaccatggtgatgcggttttggcagtacatcaatgggcgtggatagcggtttgactcacggggatttccaagtctccaccccattgacgtcaatgggagtttgttttggcaccaaaatcaacgggactttccaaaatgtcgtaacaactccgccccattgacgcaaatgggcggtaggcgtgtacggtgggaggtctatataagcagagctctctggctaactggatctacaaaacctcagcaagcagatccaccggtcgccaccatggtgagcaagggcgaggagctgttcaccggggtggtgcccatcctggtcgagctggacggcgacgtaaacggccacaagttcagcgtgtccggcgagggcgagggcgatgccacctacggcaagctgaccctgaagttcatctgcaccaccggcaagctgcccgtgccctggcccaccctcgtgaccaccctgacctacggcgtgcagtgcttcagccgctaccccgaccacatgaagcagcacgacttcttcaagtccgccatgcccgaaggctacgtccaggagcgcaccatcttcttcaaggacgacggcaactacaagacccgcgccgaggtgaagttcgagggcgacaccctggtgaaccgcatcgagctgaagggcatcgacttcaaggaggacggcaacatcctggggcacaagctggagtacaactacaacagccacaacgtctatatcatggccgacaagcagaagaacggcatcaaggtgaacttcaagatccgccacaacatcgaggacggcagcgtgcagctcgccgaccactaccagcagaacacccccatcggcgacggccccgtgctgctgcccgacaaccactacctgagcacccagtccgccctgagcaaagaccccaacgagaagcgcgatcacatggtcctgctggagttcgtgaccgccgccgggatcactctcggcatggacgagctgtacaagtaataacctcagcaatcaacctctggattacaaaatttgtgaaagattgactggtattcttaactatgttgctccttttacgctatgtggatacgctgctttaatgcctttgtatcatgctattgcttcccgtatggctttcattttctcctccttgtataaatcctggttgctgtctctttatgaggagttgtggcccgttgtcaggcaacgtggcgtggtgtgcactgtgtttgctgacgcaacccccactggttggggcattgccaccacctgtcagctcctttccgggactttcgctttccccctccctattgccacggcggaactcatcgccgcctgccttgcccgctgctggacaggggctcggctgttgggcactgacaattccgtggtgttgtcggggaagctgacgtcctttccatggctgctcgcctgtgttgccacctggattctgcgcgggacgtccttctgctacgtcccttcggccctcaatccagcggaccttccttcccgcggcctgctgccggctctgcggcctcttccgcgtcttcgccttcgccctcagacgagtcggatctccctttgggccgcctccccgcctggttccctcagccgactgtgccttctagttgccagccatctgttgtttgcccctcccccgtgccttccttgaccctggaaggtgccactcccactgtcctttcctaataaaatgaggaaattgcatcgcattgtctgagtaggtgtcattctattctggggggtggggtggggcaggacagcaagggggaggattgggtagacaatagcaggcatgctggggatgcggtgggctctatggcctcagctctgaaaacgatgcaggtggggcccgccccaactggggtaacctttg

SEQ ID NO: 2653 - DNA, 7378 bp, synthetic construct
  source 1..7378: mol_type = other DNA
tttccataggctccgcccccctgacgagcatcacaaaaatcgacgctcaagtcagaggtggcgaaacccgacaggactataaagataccaggcgtttccccctggaagctccctcgtgcgctctcctgttccgaccctgccgcttaccggatacctgtccgcctttctcccttcgggaagcgtggcgctttctcatagctcacgctgtaggtatctcagttcggtgtaggtcgttcgctccaagctgggctgtgtgcacgaaccccccgttcagcccgaccgctgcgccttatccggtaactatcgtcttgagtccaacccggtaagacacgacttatcgccactggcagcagccactggtaacaggattagcagagcgaggtatgtaggcggtgctacagagttcttgaagtggtggcctaactacggctacactagaaggacagtatttggtatctgcgctctgctgaagccagttaccttcggaaaaagagttggtagctcttgatccggcaaacaaaccaccgctggtagcggtggtttttttgtttgcaagcagcagattacgcgcagaaaaaaaggatctcaagaagatcctttgatcttttctacggggtctgacgctcagtggaacgaaaactcacgttaagggattttggtcatgagcggatacatatttgaatgtatttagaaaaataaacaaaagagtttgtagaaacgcaaaaaaggccatccgtcaggatggccttctgcttaatttgatgcctggcagtttatggcgggcgtcctgcccgccaccctccgggccgttgcttcgcaacgttcaaatccgctcccggcggatttgtcctactcaggagagcgttcaccgacaaacaacagataaaacgaaaggcccagtctttcgactgagcctttcgttttatttgatgcctggcagttccctactctcgcatggggagaccccacactaccatcggcgctacggcgtttcacttctgagttcggcatggggtcaggtgggaccaccgcgctactgccgccaggcaaattctgttttatcagaccgcttctgcgttctgatttaatctgtatcaggctgaaaatcttctctcatccgccaaaacagccaagctggagaccgtttggccccccctcgagcgcgtagaaagccagtccgcagaaacggtgctgaccccggatgaatgtcagctactgggctatctggacaagggaaaacgcaagcgcaaagagaaagcaggtagcttgcagtgggcttacatggcgatagctagactgggcggttttatggacagcaagcgaaccggaattgccagctggggcgccctctggtaaggttgggaagccctgcaaagtaaactggatggctttcttgccgccaaggatctgatggcgcaggggatcaagctctgatcaagagacaggatgaggatcgtttcgcatgattgaacaagatggattgcacgcaggttctccggccgcttgggtggagaggctattcggctatgactgggcacaacagacaatcggctgctctgatgccgccgtgttccggctgtcagcgcaggggcgcccggttctttttgtcaagaccgacctgtccggtgccctgaatgaactgcaagacgaggcagcgcggctatcgtggctggccacgacgggcgttccttgcgcagctgtgctcgacgttgtcactgaagcgggaagggactggctgctattgggcgaagtgccggggcaggatctcctgtcatctcaccttgctcctgccgagaaagtatccatcatggctgatgcaatgcggcggctgcatacgcttgatccggctacctgcccattcgaccaccaagcgaaacatcgcatcgagcgagcacgtactcggatggaagccggtcttgtcgatcaggatgatctggacgaagagcatcaggggctcgcgccagccgaactgttcgccaggctcaaggcgagcatgcccgacggcgaggatctcgtcgtgacccatggcgatgcctgcttgccgaatatcatggtggaaaatggccgcttttctggattcatcgactgtggccggctgggtgtggcggaccgctatcaggacatagcgttggctacccgtgatattgctgaagagcttggcggcgaatgggctgaccgcttcctcgtgctttacggtatcgccgctcccgattcgcagcgcatcgccttctatcgccttcttgacgagttcttctgaattattaactcgagatccactagagtgtggcggccgcattcttataatcagcatcatgatgtggtaccacatcatgatgctgattacccccaactgagagaactcaaaggttaccccagttggggcgggccccacctgcatcgttttcagagctgaggccatagagcccaccgcatccccagcatgcctgctattgtctacccaatcctcccccttgctgtcctgccccaccccaccccccagaatagaatgacacctactcagacaatgcgatgcaatttcctcattttattaggaaaggacagtgggagtggcaccttccagggtcaaggaaggcacgggggaggggcaaacaacagatggctggcaactagaaggcacagtcggctgagggaaccaggcggggaggcggcccaaagggagatccgactcgtctgagggcgaaggcgaagacgcggaagaggccgcagagccggcagcaggccgcgggaaggaaggtccgctggattgagggccgaagggacgtagcagaaggacgtcccgcgcagaatccaggtggcaacacaggcgagcagccatggaaaggacgtcagcttccccgacaacaccacggaattgtcagtgcccaacagccgagcccctgtccagcagcgggcaaggcaggcggcgatgagttccgccgtggcaatagggagggggaaagcgaaagtcccggaaaggagctgacaggtggtggcaatgccccaaccagtgggggttgcgtcagcaaacacagtgcacaccacgccacgttgcctgacaacgggccacaactcctcataaagagacagcaaccaggatttatacaaggaggagaaaatgaaagccatacgggaagcaatagcatgatacaaaggcattaaagcagcgtatccacatagcgtaaaaggagcaacatagttaagaataccagtcaatctttcacaaattttgtaatccagaggttgattgctgaggttattacttgtacagctcgtccatgccgagagtgatcccggcggcggtcacgaactccagcaggaccatgtgatcgcgcttctcgttggggtctttgctcagggcggactgggtgctcaggtagtggttgtcgggcagcagcacggggccgtcgccgatgggggtgttctgctggtagtggtcggcgagctgcacgctgccgtcctcgatgttgtggcggatcttgaagttcaccttgatgccgttcttctgcttgtcggccatgatatagacgttgtggctgttgtagttgtactccagcttgtgccccaggatgttgccgtcctccttgaagtcgatgcccttcagctcgatgcggttcaccagggtgtcgccctcgaacttcacctcggcgcgggtcttgtagttgccgtcgtccttgaagaagatggtgcgctcctggacgtagccttcgggcatggcggacttgaagaagtcgtgctgcttcatgtggtcggggtagcggctgaagcactgcacgccgtaggtcagggtggtcacgagggtgggccagggcacgggcagcttgccggtggtgcagatgaacttcagggtcagcttgccgtaggtggcatcgccctcgccctcgccggacacgctgaacttgtggccgtttacgtcgccgtccagctcgaccaggatgggcaccaccccggtgaacagctcctcgcccttgctcaccatggtggcgaccggtggatctgcttgctgaggttttgtagatccagttagccagagagctctgcttatatagacctcccaccgtacacgcctaccgcccatttgcgtcaatggggcggagttgttacgacattttggaaagtcccgttgattttggtgccaaaacaaactcccattgacgtcaatggggtggagacttggaaatccccgtgagtcaaaccgctatccacgcccattgatgtactgccaaaaccgcatcaccatggtaatagcgatgactaatacgtagatgtactgccaagtaggaaagtcccataaggtcatgtactgggcataatgccaggcgggccatttaccgtcattgacgtcaatagggggcgtacttggcatatgatacacttgatgtactgccaagtgggcagtttaccgtaaatactccacccattgacgtcaatggaaagtccctattggcgttactatgggaacatacgtcattattgacgtcaatgggcgggggtcgttgggcggtcagccaggcgggccatttaccgtaagttatgtaacgcggaactccatatatgggctatgaactaatgaccccgtaattgattactattaataactaggctgaggaccgagcccggccagtcccgagcccgaattgccccttgactgcggtgtgtaaactcacctccggcacccgccctcgggacgcgctgagctccctccgtggcttcaccgctgcggacgggcgtggaaaactcagccattcggaagtgcagctacttatattagtcttataagcccgcccaggaagtgtacgaagtacctgttaattggcggaggcgggtcacgtgggtggtgacgcactaagccggggggggccggggggcggagccccccggagggggggggacccgcgcgcatgcgcgcgggggggggaggctgtgcctcccccgggggccgcgcgcgcagcgcgcggcccccccgccgacggttttttggcgcctttttttaaaaaagaggaaggaagtcggctattttgtaaaacaaaatggcggctgtgacgtactgtcacgtgacagtgacgtgtcggggcctacttccgtgtttaagtaggtccccccccacgtcacctatgacgtagcagtgacctttgacccggaagaagttggcggccattttgtgccagttatggtgaggatgacctttgaactggaagtcacgcctccccagagctgacttaaaatggcggctctgacgtcacaaatatggcgatttttgtagtccggaaggcctaaaatggagcccaaagtttatggcgacccccaatactgacaaatggcaagaagataaaggccttatggcgaagtctggccccactcactttcgttactgattcatagctacagtgtccaatggcaactcggagtctgtttagcaaatttcccgacccccgcgagcccgaagtggtctgacacgcgcaagcgtgtcagcacgagcgggggtccgaggtgccgcgcgcagccgaaggcgtagcgcgcggccgccgagggcgttgcaccagggggaagggtcgcactcctcgctgcgctcggagtgcttagtgacttatagaggtagacaccgacaagtgaaactcccacggcctagtttttcgatgcaggtgcgcgcccggggagcccaagggcacgccctggcaccgcggccgctgagtctcgaccatcatcatcatcatcattgagtttatctgggataacagggtaatgtcatctagggataacagggtatgtcatctgggataacagggtaatgtatctagggataacagggtaatgtcatctgggataacagggtaatgtcatctagggataacagggtatgtcatctgggataacagggtaatgtatctagggataacagggtaatgtcatctgggataacagggtaatgtcatctagggataacagggtatgtcatctgggataacagggtaatgtatctagggataacagggtaatgtcatctgggataacagggtaatgtcatctagggataacagggtatgtcatctgggataacagggtaatgtatctagggataacagggtaatgtcatctgggataacagggtaatgtcatctagggataacagggtatgtcatctgggataacagggtaatgtatctagggataacagggtaatgtcatctgggataacagggtaatgtcatctagggataacagggtatgtcatctgggataacagggtaatgtatctagggataacagggtaatgtcatctgggataacagggtaatgtcatctagggataacagggtatgtcatctgggataacagggtaatgtatctagggataacagggtaatgtcatctgggataacagggtaatgtcatctagggataacagggtatgtcatctgggataacagggtaatgtatctagggataacagggtaatgtcaaacggtctccagcttggctgttttggcggatgagagaagaatcgccagcgtcgcacagcatgtttgcttgtcgccgtcgcgtctgtcacatcttttccgccagcagttagggattagcgtcttaagctggcgcgaggaccaacgtatcagccaggcgaagctgcttttgagcaccacccggatgcctatcgccaccgtcggtcgcaatgttggttttgacgatcaactctatttctcgcgggtatttaaaaaatgcaccggggccagcccgagcgagttccgtgccggttgtgaagaaaaagtgaatgatgtagccgtcaagttgtcataattggtaacgaatcagacaattgacggcttgacggagtagcatagggtttgcagaatccctgcttcgtccatttgacaggcacattatgcatgccgcttcgccttcgcgcgcgaattgatctgctgcctcgcgcgtttcggtgatgacggtgaaaacctctgacacatgcagctcccggagacggtcacagcttgtctgtaagcggatgccgggagcagacaagcccgtcagggcgcgtcagcgggtgttggcgggtgtcggggcgcagccatgacccagtcacgtagcgatagcggagtgtatactggcttaactatgcggcatcagagcagattgtactgagagtgcaccatatgcggtgtgaaataccgcacagatgcgtaaggagaaaataccgcatcaggcgctcttccgcttcctcgctcactgactcgctgcgctcggtcgttcggctgcggcgagcggtatcagctcactcaaaggcggtaatacggttatccacagaatcaggggataacgcaggaaagaacatgtgagcaaaaggccagcaaaaggccaggaaccgtaaaaaggccgcgttgctggcgtt

SEQ ID NO: 2654 - DNA, 3296 bp, synthetic construct
  source 1..3296: mol_type = other DNA
ggctccccgggcgcgcacctgcatcgaaaaactaggccgtgggagtttcacttgtcggtgtctacctctataagtcactaagcactccgagcgcagcgaggagtgcgacccttccccctggtgcaacgccctcggcggccgcgcgctacgccttcggctgcgcgcggcacctcggacccccgctcgtgctgacacgcttgcgcgtgtcagaccacttcgggctcgcgggggtcgggaaatttgctaaacagactccgagttgccattggacactgtagctatgaatcagtaacgaaagtgagtggggccagacttcgccataaggcctttatcttcttgccatttgtcagtattgggggtcgccataaactttgggctccattttaggccttccggactacaaaaatcgccatatttgtgacgtcagagccgccattttaagtcagctctggggaggcgtgacttccagttcaaaggtcatcctcaccataactggcacaaaatggccgccaacttcttccgggtcaaaggtcactgctacgtcataggtgacgtggggggggacctacttaaacacggaagtaggccccgacacgtcactgtcacgtgacagtacgtcacagccgccattttgttttacaaaatagccgacttccttcctcttttttaaaaaaaggcgccaaaaaaccgtcggcgggggggccgcgcgctgcgcgcgcggcccccgggggaggcacagcctcccccccccgcgcgcatgcgcgcgggtccccccccctccggggggctccgccccccggccccccccggcttagtgcgtcaccacccacgtgacccgcctccgccaattaacaggtacttcgtacacttcctgggcgggcttataagactaatataagtagctgcacttccgaatggctgagttttccacgcccgtccgcagcggtgaagccacggagggagctcagcgcgtcccgagggcgggtgccggaggtgagtttacacaccgcagtcaaggggcaattcgggctcgggactggccgggctcggtcctcagcctagttattaatagtaatcaattacggggtcattagttcatagcccatatatggagttccgcgttacataacttacggtaaatggcccgcctggctgaccgcccaacgacccccgcccattgacgtcaataatgacgtatgttcccatagtaacgccaatagggactttccattgacgtcaatgggtggagtatttacggtaaactgcccacttggcagtacatcaagtgtatcatatgccaagtacgccccctattgacgtcaatgacggtaaatggcccgcctggcattatgcccagtacatgaccttatgggactttcctacttggcagtacatctacgtattagtcatcgctattaccatggtgatgcggttttggcagtacatcaatgggcgtggatagcggtttgactcacggggatttccaagtctccaccccattgacgtcaatgggagtttgttttggcaccaaaatcaacgggactttccaaaatgtcgtaacaactccgccccattgacgcaaatgggcggtaggcgtgtacggtgggaggtctatataagcagagctctctggctaactggatctacaaaacctcagcaagcagatccaccggtcgccaccatggtgagcaagggcgaggagctgttcaccggggtggtgcccatcctggtcgagctggacggcgacgtaaacggccacaagttcagcgtgtccggcgagggcgagggcgatgccacctacggcaagctgaccctgaagttcatctgcaccaccggcaagctgcccgtgccctggcccaccctcgtgaccaccctgacctacggcgtgcagtgcttcagccgctaccccgaccacatgaagcagcacgacttcttcaagtccgccatgcccgaaggctacgtccaggagcgcaccatcttcttcaaggacgacggcaactacaagacccgcgccgaggtgaagttcgagggcgacaccctggtgaaccgcatcgagctgaagggcatcgacttcaaggaggacggcaacatcctggggcacaagctggagtacaactacaacagccacaacgtctatatcatggccgacaagcagaagaacggcatcaaggtgaacttcaagatccgccacaacatcgaggacggcagcgtgcagctcgccgaccactaccagcagaacacccccatcggcgacggccccgtgctgctgcccgacaaccactacctgagcacccagtccgccctgagcaaagaccccaacgagaagcgcgatcacatggtcctgctggagttcgtgaccgccgccgggatcactctcggcatggacgagctgtacaagtaataacctcagcaatcaacctctggattacaaaatttgtgaaagattgactggtattcttaactatgttgctccttttacgctatgtggatacgctgctttaatgcctttgtatcatgctattgcttcccgtatggctttcattttctcctccttgtataaatcctggttgctgtctctttatgaggagttgtggcccgttgtcaggcaacgtggcgtggtgtgcactgtgtttgctgacgcaacccccactggttggggcattgccaccacctgtcagctcctttccgggactttcgctttccccctccctattgccacggcggaactcatcgccgcctgccttgcccgctgctggacaggggctcggctgttgggcactgacaattccgtggtgttgtcggggaagctgacgtcctttccatggctgctcgcctgtgttgccacctggattctgcgcgggacgtccttctgctacgtcccttcggccctcaatccagcggaccttccttcccgcggcctgctgccggctctgcggcctcttccgcgtcttcgccttcgccctcagacgagtcggatctccctttgggccgcctccccgcctggttccctcagccgactgtgccttctagttgccagccatctgttgtttgcccctcccccgtgccttccttgaccctggaaggtgccactcccactgtcctttcctaataaaatgaggaaattgcatcgcattgtctgagtaggtgtcattctattctggggggtggggtggggcaggacagcaagggggaggattgggtagacaatagcaggcatgctggggatgcggtgggctctatggcctcagctctgaaaacgatgcaggtggggcccgccccaactggggtaacctttg

SEQ ID NO: 2655 - protein, 351 aa, synthetic construct
MVPKKKRKVSNLLTVHQNLPALPVDATSDEVRKNLMDMFRDRQAFSEHTWKMLLSVCRSWAAWCKLNNRKWFPAEPEDVRDYLLYLQARGLAVKTIQQHLGQLNMLHRRSGLPRPSDSNAVSLVMRRIRKENVDAGERAKQALAFERTDFDQVRSLMENSDRCQDIRNLAFLGIAYNTLLRIAEIARIRVKDISRTDGGRMLIHIGRTKTLVSTAGVEKALSLGVTKLVERWISVSGVADDPNNYLFCRVRKNGVAAPSATSQLSTRALEGIFEATHRLIYGAKDDSGQRYLAWSGHSARVGAARDMARAGVSIPEIMQAGGWTNVNIVMNYIRNLDSETGAMVRLLEDGD

SEQ ID NO: 2656 - protein, 518 aa, synthetic construct; identical to SEQ ID NO: 2628

SEQ ID NO: 2657 - protein, 343 aa, synthetic construct
MSNLLTVHQNLPALPVDATSDEVRKNLMDMFRDRQAFSEHTWKMLLSVCRSWAAWCKLNNRKWFPAEPEDVRDYLLYLQARGLAVKTIQQHLGQLNMLHRRSGLPRPSDSNAVSLVMRRIRKENVDAGERAKQALAFERTDFDQVRSLMENSDRCQDIRNLAFLGIAYNTLLRIAEIARIRVKDISRTDGGRMLIHIGRTKTLVSTAGVEKALSLGVTKLVERWISVSGVADDPNNYLFCRVRKNGVAAPSATSQLSTRALEGIFEATHRLIYGAKDDSGQRYLAWSGHSARVGAARDMARAGVSIPEIMQAGGWTNVNIVMNYIRNLDSETGAMVRLLEDGD

SEQ ID NO: 2658 - protein, 500 aa, synthetic construct [sequence omitted]

SEQ ID NO: 2659 - protein, 605 aa, synthetic construct
MDTYAGAYDRQSRERENSSAASPATQRSANEDKAADLQREVERDGGRFRFVGHFSEAPGTSAFGTAERPEFERILNECRAGRLNMIIVYDVSRFSRLKVMDAIPIVSELLALGVTIVSTQEGVFRQGNVMDLIHLIMRLDASHKESSLKSAKILDTKNLQRELGGYVGGKAPYGFELVSETKEITRNGRMVNVVINKLAHSTTPLTGPFEFEPDVIRWWWREIKTHKHLPFKPGSQAAIHPGSITGLCKRMDADAVPTRGETIGKKTASSAWDPATVMRILRDPRIAGFAAEVIYKKKPDGTPTTKIEGYRIQRDPITLRPVELDCGPIIEPAEWYELQAWLDGRGRGKGLSRGQAILSAMDKLYCECGAVMTSKRGEESIKDSYRCRRRKVVDPSAPGQHEGTCNVSMAALDKFVAERIFNKIRHAEGDEETLALLWEAARRFGKLTEAPEKSGERANLVAERADALNALEELYEDRAAGAYDGPVGRKHFRKQQAALTLRQQGAEERLAELEAAEAPKLPLDQWFPEDADADPTGPKSWWGRASVDDKRVFVGLFVDKIVVTKSTTGRGQGTPIEKRASITWAKPPTDDDEDDAQDGTEDVAA

SEQ ID NO: 2660 - protein, 219 aa, synthetic construct
MATREQQPEGRRLKVARIYLRASTDEQNLERQESLVAATRAAGYYVAGIYREKASGARADRPELLRMIADLQPGEVVVAEKIDRISRLPLAEAERLVASIRAKGAKLAVPGVVDLSELAAEANGVAKIVLESVQDMLLKLALQMARDDYEDRRERQRQGVQLAKAAGRYTGRKRDAGMHDRIITLRSGGSSIAKTAKLVGCSPSQVKRVWAAWNAQQQK

SEQ ID NO: 2661 - DNA, 34 bp, synthetic construct
  source 1..34: mol_type = other DNA
ataacttcgtatagcatacattatacgaagttat

SEQ ID NO: 2662 - DNA, 34 bp, synthetic construct
  source 1..34: mol_type = other DNA
ataacttcgtatagcatacattatacgaacggta

SEQ ID NO: 2663 - DNA, 34 bp, synthetic construct
  source 1..34: mol_type = other DNA
taccgttcgtatagcatacattatacgaagttat

SEQ ID NO: 2664 - DNA, 34 bp, synthetic construct
  source 1..34: mol_type = other DNA
taccgttcgtatagcatacattatacgaacggta

SEQ ID NO: 2665 - DNA, 50 bp, synthetic construct
  source 1..50: mol_type = other DNA
tcggccggcttgtcgacgacggcggtctccgtcgtcaggatcatccgggc

SEQ ID NO: 2666 - DNA, 58 bp, synthetic construct
  source 1..58: mol_type = other DNA
gtcgtggtttgtctggtcaaccaccgcggtctcagtggtgtacggtacaaaccccgac

SEQ ID NO: 2667 - DNA, 54 bp, synthetic construct
  source 1..54: mol_type = other DNA
tcggccggcttgtcgacgacggcggtctcagtggtgtacggtacaaaccccgac

SEQ ID NO: 2668 - DNA, 54 bp, synthetic construct
  source 1..54: mol_type = other DNA
gtcgtggtttgtctggtcaaccaccgcggtctccgtcgtcaggatcatccgggc

SEQ ID NO: 2669 - DNA, 45 bp, synthetic construct
  source 1..45: mol_type = other DNA
tgcgggtgccagggcgtgcccttgggctccccgggcgcgtactcc

SEQ ID NO: 2670 - DNA, 42 bp, synthetic construct
  source 1..42: mol_type = other DNA
gtgccccaactggggtaacctttgagttctctcagttggggg

SEQ ID NO: 2671 - DNA, 42 bp, synthetic construct
  source 1..42: mol_type = other DNA
tgcgggtgccagggcgtgcccttgagttctctcagttggggg

SEQ ID NO: 2672 - DNA, 45 bp, synthetic construct
  source 1..45: mol_type = other DNA
ttgccccaactggggtaacctttgggctccccgggcgcgtactcc

SEQ ID NO: 2673 - protein, 409 aa, synthetic construct
ANPNANPNANPNANPNANPNANPNANPNANPNANPNANPNANPNANPNANPNANPNANPNKNNQGNGQGHNMPNDPNRNVDENANANSAVKNNNNEEPSDKHIKEYLNKIQNSLSTEWSPCSVTCGNGIQVRIKPGSANKPKDELDYANDIEKKICKMEKCSSVFNVVNSSIGLIMVLSFLFLNENTTSGFLGPLLVLQAGFFLLTRILTIPQSLDSWWTSLNFQGGAPTCPGQNSQSPTSNHSPTSCPPICPGYRWMCLRRFIIFLFILLLCLIFLLVLLDYQGMLPVCPLLPGTSTTGTGPCRTCTIPAQGTSMFPSCCCTKPSDGNCTCIPIPSSWAFARFLWEWASVRFSWLSLLVPFVQWFAGLSPTVWLSVIWMMWYRGPSLYNTLSPFLPLLPISFCLWVYI

SEQ ID NO: 2674 - protein, 410 aa, synthetic construct
ANPNANPNANPNANPNANPNANPNANPNANPNANPNANPNANPNANPNANPNANPNANPNKNNQGNGQGHNMPNDPNRNVDENANANSAVKNNNNEEPSDKHIKEYLNKIQNSLSTEWSPCSVTCGNGIQVRIKPGSANKPKDELDYANDIEKKICKMEKCSSVFNVVNSSIGLIMVLSFLFLNENTTSGFLGPLLVLQAGFFLLTRILTIPQSLDSWWTSLNFQGGAPTCPGQNSQSPTSNHSPTSCPPICPGYRWMCLRRFIIFLFILLLCLIFLLVLLDYQGMLPVCPLLPGTSTTGTGPCRTCTIPAQGTSMFPSCCCTKPSDGNCTCIPIPSSWAFARFLWEWASVRFSWLSLLVPFVQWFAGLSPTVWLSVIWMMWYRGPSLYNTLSPFLPLLPISFCLWVYIC

SEQ ID NO: 2675 - protein, 218 aa, synthetic construct
MKIKTGARILALSALTTMMFSASALAANPNANPNANPNANPNANPNANPNANPNANPNANPNANPNANPNANPNANPNANPNANPNKNNQGNGQGHNMPNDPNRNVDENANANSAVKNNNNEEPSDKHIKEYLNKIQNSLSTEWSPCSVTCGNGIQVRIKPGSANKPKDELDYANDIEKKICKMEKCSSVFNVVNSSIGLIMVLSFLFLNPHHHHHHA

SEQ ID NO: 2676 - protein, 219 aa, synthetic construct
MKIKTGARILALSALTTMMFSASALAANPNANPNANPNANPNANPNANPNANPNANPNANPNANPNANPNANPNANPNANPNANPNKNNQGNGQGHNMPNDPNRNVDENANANSAVKNNNNEEPSDKHIKEYLNKIQNSLSTEWSPCSVTCGNGIQVRIKPGSANKPKDELDYANDIEKKICKMEKCSSVFNVVNSSIGLIMVLSFLFLNPHHHHHHAC

SEQ ID NO: 2677 - protein, 25 aa, synthetic construct
  SITE 25: note = Amidated residue side chain modifed with maleimide linker
NPNANPNANPNANPNANPNANPNAK

SEQ ID NO: 2678 - protein, 41 aa, synthetic construct
  SITE 41: note = Amidated residue side chain modifed with maleimide linker
ANPNKNNQGNGQGHNMPNDPNRNVDENANANSAVKNNNNEK

SEQ ID NO: 2679 - protein, 67 aa, synthetic construct
  SITE 67: note = Amidated residue side chain modifed with maleimide linker
EPSDKHIKEYLNKIQNSLSTEWSPSSVTSGNGIQVRIKPGSANKPKDELDYANDIEKKISKMEKSSK

SEQ ID NO: 2680 - protein, 672 aa, synthetic construct; identical to SEQ ID NO: 1012

SEQ ID NO: 2681 - protein, 266 aa, synthetic construct
MRGTPKTHLLAFSLLCLLSKVRTQLCPTPCTCPWPPPRCPLGVPLVLDGCGCCRVCARRLGEPCDQLHVCDASQGLVCQPGAGPGGRGALCLLAEDDSSCEVNGRLYREGETFQPHCSIRCRCEDGGFTCVPLCSEDVRLPSWDCPHPRRVEVLGKCCPEWVCGQGGGLGTQPLPAQGPQFSGLVSSLPPGVPCPEWSTAWGPCSTTCGLGMATRVSNQNRFCRLETQRRLCLSRPCPPSRGRSPQNSAFGGGGSGGGGSGGGGSC

SEQ ID NO: 2682 - protein, 477 aa, synthetic construct
MKIKTGARILALSALTTMMFSASALASDTGRPFVEMYSEIPEIIHMTEGRELVIPCRVTSPNITVTLKKFPLDTLIPDGKRIIWDSRKGFIISNATYKEIGLLTCEATVNGHLYKTNYLTHRQTNTIIDVVLSPSHGIELSVGEKLVLNCTARTELNVGIDFNWEYPSSKHQHKKLVNRDLKTQSGSEMKKFLSTLTIDGVTRSDQGLYTCAASSGLMTKKNSTFVRVHEKDKTHTCPPCPAPELLGGPSVFLFPPKPKDTLMISRTPEVTCVVVDVSHEDPEVKFNWYVDGVEVHNAKTKPREEQYNSTYRVVSVLTVLHQDWLNGKEYKCKVSNKALPAPIEKTISKAKGQPREPQVYTLPPSRDELTKNQVSLTCLVKGFYPSDIAVEWESNGQPENNYKTTPPVLDSDGSFFLYSKLTVDKSRWQQGNVFSCSVMHEALHNHYTQKSLSLSPGGGGSGGGGSGGGGSGGGGSC

SEQ ID NO: 2683 - protein, 247 aa, synthetic construct
MKIKTGARILALSALTTMMFSASALASDTGRPFVEMYSEIPEIIHMTEGRELVIPCRVTSPNITVTLKKFPLDTLIPDGKRIIWDSRKGFIISNATYKEIGLLTCEATVNGHLYKTNYLTHRQTNTIIDVVLSPSHGIELSVGEKLVLNCTARTELNVGIDFNWEYPSSKHQHKKLVNRDLKTQSGSEMKKFLSTLTIDGVTRSDQGLYTCAASSGLMTKKNSTFVRVHEKGGGGSGGGGSGGGGSC

SEQ ID NO: 2684 - protein, 273 aa, synthetic construct
MKIKTGARILALSALTTMMFSASALAEVQLVESGGGLVQPGGSLRLSCAASGYDFTHYGMNWVRQAPGKGLEWVGWINTYTGEPTYAADFKRRFTFSLDTSKSTAYLQMNSLRAEDTAVYYCAKYPYYYGTSHWYFDVWGQGTLVTVSSASTKGPSVFPLAPSSKSTSGGTAALGCLVKDYFPEPVTVSWNSGALTSGVHTFPAVLQSSGLYSLSSVVTVPSSSLGTQTYICNVNHKPSNTKVDKKVEPKSCDKTHLGGGGSGGGGSGGGGSC

SEQ ID NO: 2685 - protein, 499 aa, synthetic construct
MKIKTGARILALSALTTMMFSASALAEVQLVESGGGLVQPGGSLRLSCAASGYTFTNYGMNWVRQAPGKGLEWVGWINTYTGEPTYAADFKRRFTFSLDTSKSTAYLQMNSLRAEDTAVYYCAKYPHYYGSSHWYFDVWGQGTLVTVSSASTKGPSVFPLAPSSKSTSGGTAALGCLVKDYFPEPVTVSWNSGALTSGVHTFPAVLQSSGLYSLSSVVTVPSSSLGTQTYICNVNHKPSNTKVDKKVEPKSCDKTHTCPPCPAPELLGGPSVFLFPPKPKDTLMISRTPEVTCVVVDVSHEDPEVKFNWYVDGVEVHNAKTKPREEQYNSTYRVVSVLTVLHQDWLNGKEYKCKVSNKALPAPIEKTISKAKGQPREPQVYTLPPSREEMTKNQVSLTCLVKGFYPSDIAVEWESNGQPENNYKTTPPVLDSDGSFFLYSKLTVDKSRWQQGNVFSCSVMHEALHNHYTQKSLSLSPGKKDELGGGGSGGGGSGGGGSC

SEQ ID NO: 2686 - protein, 537 aa, synthetic construct
MKIKTGARILALSALTTMMFSASALAEVQLVESGGGLVQPGGSLRLSCAASGYDFTHYGMNWVRQAPGKGLEWVGWINTYTGEPTYAADFKRRFTFSLDTSKSTAYLQMNSLRAEDTAVYYCAKYPYYYGTSHWYFDVWGQGTLVTVSSASTKGPSVFPLAPSSKSTSGGTAALGCLVKDYFPEPVTVSWNSGALTSGVHTFPAVLQSSGLYSLSSVVTVPSSSLGTQTYICNVNHKPSNTKVDKKVEPKSCDKTHLGGSSGSGSGSTGTSSSGTGTSAGTTGTSASTSGSGSGGGGGSGGGGSAGGDIQLTQSPSSLSASVGDRVTITCSASQDISNYLNWYQQKPGKAPKVLIYFTSSLHSGVPSRFSGSGSGTDFTLTISSLQPEDFATYYCQQYSTVPWTFGQGTKVEIKRTVAAPSVFIFPPSDEQLKSGTASVVCLLNNFYPREAKVQWKVDNALQSGNSQESVTEQDSKDSTYSLSSTLTLSKADYEKHKVYACEVTHQGLSSPVTKSFNRGECGGGGSGGGGSGGGGSC

SEQ ID NO: 2687 - protein, 13 aa, synthetic construct
KIKRLNIVEWQPK

SEQ ID NO: 2688 - protein, 18 aa, synthetic construct
SPSDTHEPDEEDQNRWYP

SEQ ID NO: 2689 - protein, 38 aa, synthetic construct
SEEEEESNLFERLLRQRTKQLQLKRRIIQTLKDLQKLE

SEQ ID NO: 2690 - DNA, 18 bp, synthetic construct
  source 1..18: mol_type = other DNA
gaaccgcatcgagctgaa

SEQ ID NO: 2691 - DNA, 21 bp, synthetic construct
  source 1..21: mol_type = other DNA
tgcttgtcggccatgatatag

SEQ ID NO: 2692 - DNA, 24 bp, synthetic construct
  source 1..24: mol_type = other DNA
atcgacttcaaggaggacggcaac

SEQ ID NO: 2693 - DNA, 20 bp, synthetic construct
  source 1..20: mol_type = other DNA
ggattttgggagggtcactc

SEQ ID NO: 2694 - DNA, 20 bp, synthetic construct
  source 1..20: mol_type = other DNA
tacagttcctggacctgtgt

SEQ ID NO: 2695 - DNA, 27 bp, synthetic construct
  source 1..27: mol_type = other DNA
acactggtaccctaaaaatagatttca

SEQ ID NO: 2696 - protein, 608 aa, synthetic construct
ITTKEWQPKVIRKTHVKGTYPLFLCTKHRINNNMIQYLDSIAPEHYYGGGGFSIMQFSLQALYEEFIKAKNWWTNTNCFLPLVRYMGCSFKFYKTEFYDYIVLIERCYPLACTDEMYLSTQPSIMMLTRKCIFVPCKQNSKGKKPYKKVRVRPPSQMTTGWHFSQDLANMPLVVLKTSVCSFDRYYTDSTAKSTTIGFKTLNTQTFRYHDWQEPPTTGYKPQNLLWFYGAENGSPVDPNNTIVSNLIYLGGTGPYEKGTPIKTNISNYFSEPKLWGNIFHDDYTSGTSPVFVTNKSPSEIKTAWNTIKDLTVKASGVFTLRTIPLWLPCRYNPFADKATNNKIWLVSIHSDHTEWKPIDNPLLQRTDLPLWLLVWGWQDWQKKNQQTSQPDINYLTVISSPYISCYPKLDYYVLLDEGFWEGHSTYIESITDSDKKHWYPKNRFQIETLNLIANTGPGTVKLRENQAAEGHMVYRFNFKLGGCPAPMEKICDPSKQSKYPIPNNQQQTTSLQSPENPIQTYLYDFDERRGLLTERATKRIKQDHTSEKTVLPFTGAATDLPILQTTSQEESSSEEEEEQQAEKKLLQLRRKQHRLRERILQLLDIQNT

SEQ ID NO: 2697 - protein, 131 aa, synthetic construct
MPWYPRRRYPRRRYRWLRRWRARRPFRPRYRRRYWSPENPIQTYLYDFDERRGLLTERATKRIKQDHTSEKTVLPFTGAATDLPILQTTSQEESSSEEEEEQQAEKKLLQLRRKQHRLRERILQLLDIQNT

SEQ ID NO: 2698 - protein, 612 aa, synthetic construct
RTCYIKGQDCLIYYSNLRLGMNSTMYEKSIVPVHWPGGGSFSVSMLTLDALYDIHKLCRNWWTSTNQDLPLVRYKGCKITFYQSTFTDYIVRIHTELPANSNKLTYPNTHPLMMMMSKYKHIIPSRQTRRKKKPYTKIFVKPPPQFENKWYFATDLYKIPLLQIHCTACNLQNPFVKPDKLSNNVTLWSLNTISIQNRNMSVDQGQSWPFKILGTQSFYFYFYTGANLPGDTTQIPVADLLPLTNPRINRPGQSLNEAKITDHITFTEYKNKFTNYWGNPFNKHIQEHLDMILYSLKSPEAIKNEWTTENMKWNQLNNAGTMALTPFNEPIFTQIQYNPDRDTGEDTQLYLLSNATGTGWDPPGIPELILEGFPLWLIYWGFADFQKNLKKVTNIDTNYMLVAKTKFTQKPGTFYLVILNDTFVEGNSPYEKQPLPEDNIKWYPQVQYQLEAQNKLLQTGPFTPNIQGQLSDNISMFYKFYFKWGGSPPKAINVENPAHQIQYPIPRNEHETTSLQSPGEAPESILYSFDYRHGNYTTTALSRISQDWALKDTVSKITEPDRQQLLKQALECLQISEETQEKKEKEVQQLISNLRQQQQLYRERIISLLKDQ

SEQ ID NO: 2699 - DNA, 5452 bp, synthetic construct; identical to SEQ ID NO: 2618
  source 1..5452: mol_type = other DNA

SEQ ID NO: 2700 - DNA, 6473 bp, synthetic construct; identical to SEQ ID NO: 2622
  source 1..6473: mol_type = other DNA

SEQ ID NO: 2701 - DNA, 5128 bp, synthetic construct
  source 1..5128: mol_type = other DNA
gtcagtgagcgaggaagcggaagagcgcccaatacgcaaaccgcctctccccgcgcgttggccgattcattaatgcagctggcacgacaggtttcccgactggaaagcgggcagtgagcgcaacgcaattaatgtgagttagctcactcattaggcaccccaggctttacactttatgcttccggctcgtatgttgtgtggaattgtgagcggataacaatttcacacaggaaacagctatgaccatgattacgccaagcttgcatgccctgcaggcagctgcgcgctcgctcgctcactgaggccgcccgggcaaagcccgggcgtcgggcgacctttggtcgcccggcctcagtgagcgagcgagcgcgcagagagggagtggccaactccatcactaggggttcctgcgaaagatatctaataaatattcaacaggaaaaccacctaatttaaattgccgaccacaaaccgtcacttagttcccctttttgcaacaacttctgcttttttccaactgccggaaaaccacataatttgcatggctaaccacaaactgatatgctaattaacttccacaaaacaacttccccttttaaaaccacacctacaaattaattattaaacacagtcacatcctgggaggtactaccacactataataccaagtgctaatccgaatggctgagtttatgccgctagacggagaacgcatcagttactgactgcggactgaacttgggcgggtgccgaaggtgagtgaaaccaccgaagtcaaggggcaattcgggctagttcagtctagcggaacgggcaagaaacttaaaattattttatttttcagatggatggctgatcgagtgtagccagatctgcgatcgacattgattattgactagttattaatagtaatcaattacggggtcattagttcatagcccatatatggagttccgcgttacataacttacggtaaatggcccgcctggctgaccgcccaacgacccccgcccattgacgtcaataatgacgtatgttcccatagtaacgccaatagggactttccattgacgtcaatgggtggagtatttacggtaaactgcccacttggcagtacatcaagtgtatcatatgccaagtacgccccctattgacgtcaatgacggtaaatggcccgcctggcattatgcccagtacatgaccttatgggactttcctacttggcagtacatctacgtattagtcatcgctattaccatggtgatgcggttttggcagtacatcaatgggcgtggatagcggtttgactcacggggatttccaagtctccaccccattgacgtcaatgggagtttgttttggcaccaaaatcaacgggactttccaaaatgtcgtaacaactccgccccattgacgcaaatgggcggtaggcgtgtacggtgggaggtctatataagcagagctctctggctaactggatctacaaaaaagcagatccaccggtcgccaccatggtgagcaagggcgaggagctgttcaccggggtggtgcccatcctggtcgagctggacggcgacgtaaacggccacaagttcagcgtgtccggcgagggcgagggcgatgccacctacggcaagctgaccctgaagttcatctgcaccaccggcaagctgcccgtgccctggcccaccctcgtgaccaccctgacctacggcgtgcagtgcttcagccgctaccccgaccacatgaagcagcacgacttcttcaagtccgccatgcccgaaggctacgtccaggagcgcaccatcttcttcaaggacgacggcaactacaagacccgcgccgaggtgaagttcgagggcgacaccctggtgaaccgcatcgagctgaagggcatcgacttcaaggaggacggcaacatcctggggcacaagctggagtacaactacaacagccacaacgtctatatcatggccgacaagcagaagaacggcatcaaggtgaacttcaagatccgccacaacatcgaggacggcagcgtgcagctcgccgaccactaccagcagaacacccccatcggcgacggccccgtgctgctgcccgacaaccactacctgagcacccagtccgccctgagcaaagaccccaacgagaagcgcgatcacatggtcctgctggagttcgtgaccgccgccgggatcactctcggcatggacgagctgtacaagtaataagcttgcggccgcttcgagcagacatgataagatacattgatgagtttggacaaaccacaactagaatgcagtgaaaaaaatgctttatttgtgaaatttgtgatgctattgctttatttgtaaccattataagctgcaataaacaagttaacaacaacaattgcatgaatgaataaaggccagcattaattcacttaaggagtctgtttatttaagttaaaccttaataaacggtcaccgcctccctaatacgcaggcgcagaaagggggctccgccccctttaacccccagggggctccgccccctgaaacccccaagggggctacgcccccttacacccccgatatccccgcaggaacccctagtgatggagttggccactccctctctgcgcgctcgctcgctcactgaggccgggcgaccaaaggtcgcccgacgcccgggctttgcccgggcggcctcagtgagcgagcgagcgcgcagctgcctgcaggggcgcctgggtaccgagctcgaattcactggccgtcgttttacaacgtcgtgactgggaaaaccctggcgttacccaacttaatcgccttgcagcacatccccctttcgccagctggcgtaatagcgaagaggcccgcaccgatcgcccttcccaacagttgcgcagcctgaatggcgaatggcgcctgatgcggtattttctccttacgcatctgtgcggtatttcacaccgcatatggtgcactctcagtacaatctgctctgatgccgcatagttaagccagccccgacacccgccaacacccgctgacgcgccctgacgggcttgtctgctcccggcatccgcttacagacaagctgtgaccgtctccgggagctgcatgtgtcagaggttttcaccgtcatcaccgaaacgcgcgagacgaaagggcctcgtgatacgcctatttttataggttaatgtcatgataataatggtttcttagacgtcaggtggcacttttcggggaaatgtgcgcggaacccctatttgtttatttttctaaatacattcaaatatgtatccgctcatgagacaataaccctgataaatgcttcaataatattgaaaaaggaagagtatgagtattcaacatttccgtgtcgcccttattcccttttttgcggcattttgccttcctgtttttgctcacccagaaacgctggtgaaagtaaaagatgctgaagatcagttgggtgcacgagtgggttacatcgaactggatctcaacagcggtaagatccttgagagttttcgccccgaagaacgttttccaatgatgagcacttttaaagttctgctatgtggcgcggtattatcccgtattgacgccgggcaagagcaactcggtcgccgcatacactattctcagaatgacttggttgagtactcaccagtcacagaaaagcatcttacggatggcatgacagtaagagaattatgcagtgctgccataaccatgagtgataacactgcggccaacttacttctgacaacgatcggaggaccgaaggagctaaccgcttttttgcacaacatgggggatcatgtaactcgccttgatcgttgggaaccggagctgaatgaagccataccaaacgacgagcgtgacaccacgatgcctgtagcaatggcaacaacgttgcgcaaactattaactggcgaactacttactctagcttcccggcaacaattaatagactggatggaggcggataaagttgcaggaccacttctgcgctcggcccttccggctggctggtttattgctgataaatctggagccggtgagcgtgggtctcgcggtatcattgcagcactggggccagatggtaagccctcccgtatcgtagttatctacacgacggggagtcaggcaactatggatgaacgaaatagacagatcgctgagataggtgcctcactgattaagcattggtaactgtcagaccaagtttactcatatatactttagattgatttaaaacttcatttttaatttaaaaggatctaggtgaagatcctttttgataatctcatgaccaaaatcccttaacgtgagttttcgttccactgagcgtcagaccccgtagaaaagatcaaaggatcttcttgagatcctttttttctgcgcgtaatctgctgcttgcaaacaaaaaaaccaccgctaccagcggtggtttgtttgccggatcaagagctaccaactctttttccgaaggtaactggcttcagcagagcgcagataccaaatactgttcttctagtgtagccgtagttaggccaccacttcaagaactctgtagcaccgcctacatacctcgctctgctaatcctgttaccagtggctgctgccagtggcgataagtcgtgtcttaccgggttggactcaagacgatagttaccggataaggcgcagcggtcgggctgaacggggggttcgtgcacacagcccagcttggagcgaacgacctacaccgaactgagatacctacagcgtgagctatgagaaagcgccacgcttcccgaagggagaaaggcggacaggtatccggtaagcggcagggtcggaacaggagagcgcacgagggagcttccagggggaaacgcctggtatctttatagtcctgtcgggtttcgccacctctgacttgagcgtcgatttttgtgatgctcgtcaggggggcggagcctatggaaaaacgccagcaacgcggcctttttacggttcctggccttttgctggccttttgctcacatgttctttcctgcgttatcccctgattctgtggataaccgtattaccgcctttgagtgagctgataccgctcgccgcagccgaacgaccgagcgcagcga

SEQ ID NO: 2702 - protein, 286 aa, synthetic construct
MSIQHFRVALIPFFAAFCLPVFAHPETLVKVKDAEDQLGARVGYIELDLNSGKILESFRPEERFPMMSTFKVLLCGAVLSRIDAGQEQLGRRIHYSQNDLVEYSPVTEKHLTDGMTVRELCSAAITMSDNTAANLLLTTIGGPKELTAFLHNMGDHVTRLDRWEPELNEAIPNDERDTTMPVAMATTLRKLLTGELLTLASRQQLIDWMEADKVAGPLLRSALPAGWFIADKSGAGERGSRGIIAALGPDGKPSRIVVIYTTGSQATMDERNRQIAEIGASLIKHW

SEQ ID NO: 2703 - DNA, 20 bp, synthetic construct
  source 1..20: mol_type = other DNA
gaagcccaccaaaagcaatt

SEQ ID NO: 2704 - DNA, 21 bp, synthetic construct
  source 1..21: mol_type = other DNA
agttcccgtgtctatagtcga

SEQ ID NO: 2705 - DNA, 22 bp, synthetic construct
  source 1..22: mol_type = other DNA
acttcgttacagagtccagggg

SEQ ID NO: 2706 - protein, 150 aa, Betatorquevirus sp.
MPWWYRRRSYNPWRRRNWFRRPRKTIYRRYRRRRRWPTYVVPNNFNETTSLQNPTTRPEHFLYSFDERRGQLTEKATKRLLKDWETKETSLLSTEYRFAEPTQTQAPQEDPSSEEEEESNLFERLLRQRTKQLQLKRRIIQTLKDLQKLE

SEQ ID NO: 2707 - protein, 20 aa, Betatorquevirus sp.
LQNPFVKPDKLSNNVTLWSL

SEQ ID NO: 2708 - protein, 141 aa, Betatorquevirus sp.
NTISIQNRNMSVDQGQSWPFKILGTQSFYFYFYTGANLPGDTTQIPVADLLPLTNPRINRPGQSLNEAKITDHITFTEYKNKFTNYWGNPFNKHIQEHLDMILYSLKSPEAIKNEWTTENMKWNQLNNAGTMALTPFNEPI

SEQ ID NO: 2709 - protein, 139 aa, Betatorquevirus sp.
FTQIQYNPDRDTGEDTQLYLLSNATGTGWDPPGIPELILEGFPLWLIYWGFADFQKNLKKVTNIDTNYMLVAKTKFTQKPGTFYLVILNDTFVEGNSPYEKQPLPEDNIKWYPQVQYQLEAQNKLLQTGPFTPNIQGQL

SEQ ID NO: 2710 - protein, 17 aa, Betatorquevirus sp.
SDNISMFYKFYFKWGGS

SEQ ID NO: 2711 - protein, 54 aa, Betatorquevirus sp.
MPPYWRQKYYRRRYRPFSWRTRRIIQRRKRWRYRKPRKTYWRRKLRVRKRFYKR

SEQ ID NO: 2712 - protein, 185 aa, Betatorquevirus sp.
KLKKIVLKQFQPKIIRRCTIFGTICLFQGSPERANNNYIQTIYSYVPDKEPGGGGWTLITESLSSLWEDWEHLKNVWTQSNAGLPLVRYGGVTLYFYQSAYTDYIAQVFNCYPMTDTKYTHADSAPNRMLLKKHVIRVPSRETRKKRKPYKRVRVGPPSQMQNKWYFQRDICEIPLIMIAATAVD

SEQ ID NO: 2713 - protein, 20 aa, Betatorquevirus sp.
FRYPFCASDCASNNLTLTCL

SEQ ID NO: 2714 - protein, 110 aa, Betatorquevirus sp.
NPLLFQNQDFDHPSDTQGYFPKPGVYLYSTQRSNKPSSSDCIYLGNTKDNQEGKSASSLMTLKTQKITDWGNPFWHYYIDGSKKIFSYFKPPSQLDSSDFEHMTELAEPM

SEQ ID NO: 2715 - protein, 138 aa, Betatorquevirus sp.
FIQVRYNPERDTGQGNLIYVTENFRGQHWDPPSSDNLKLDGFPLYDMCWGFIDWIEKVHETENLLTNYCFCIRSSAFNEKKTVFIPVDHSFLTGFSPYETPVKSSDQAHWHPQIRFQTKSINDICLTGPGCARSPYGN

SEQ ID NO: 2716 - protein, 15 aa, Betatorquevirus sp.
YMQAKMSYKFHVKWG

SEQ ID NO: 2717 - protein, 133 aa, Betatorquevirus sp.
GCPKTYEKPYDPCSQPNWTIPHNLNETIQIQNPNTCPQTELQEWDWRRDIVTKKAIERIRQHTEPHETLQISTGSKHNPPVHRQTSPWTDSETDSEEEKDQTQEIQIQLNKLRKHQQHLKQQLKQYLKPQNIE

SEQ ID NO: 2718 - protein, 45 aa, Betatorquevirus sp.
MPWWYRRRSYNPWRRRNWFRRPRKTIYRRYRRRRRWVRRKPFYKR

SEQ ID NO: 2719 - protein, 184 aa, Betatorquevirus sp.
KIKRLNIVEWQPKSIRKCRIKGMLCLFQTTEDRLSYNFDMYEESIIPEKLPGGGGFSIKNISLYALYQEHIHAHNIFTHTNTDRPLARYTGCSLKFYQSKDIDYVVTYSTSLPLRSSMGMYNSMQPSIHLMQQNKLIVPSKQTQKRRKPYIKKHISPPTQMKSQWYFQHNIANIPLLMIRTTAL

SEQ ID NO: 2720 - protein, 156 aa, Betatorquevirus sp.
TLDNYYIGSRQLSTNVTIHTLNTTYIQNRDWGDRNKTYYCQTLGTQRYFLYGTHSTAQNINDIKLQELIPLTNTQDYVQGFDWTEKDKHNITTYKEFLTKGAGNPFHAEWITAQNPVIHTANSPTQIEQIYTASTTTFQNKKLTDLPTPGYIFITP

SEQ ID NO: 2721 - protein, 158 aa, Betatorquevirus sp.
TVSLRYNPYKDLAERNKCYFVRSKINAHGWDPEQHQELINSDLPQWLLLFGYPDYIKRTQNFALVDTNYILVDHCPYTNPEKTPFIPLSTSFIEGRSPYSPSDTHEPDEEDQNRWYPCYQYQQESINSICLSGPGTPKIPKGITAEAKVKYSFNFKWG

SEQ ID NO: 2722 - protein, 129 aa, Betatorquevirus sp.
GDLPPMSTITNPTDQPTYVVPNNFNETTSLQNPTTRPEHFLYSFDERRGQLTEKATKRLLKDWETKETSLLSTEYRFAEPTQTQAPQEDPSSEEEEESNLFERLLRQRTKQLQLKRRIIQTLKDLQKLE

SEQ ID NO: 2723 - protein, 21 aa, Betatorquevirus sp.
TLDNYYIGSRQLSTNVTIHTL

SEQ ID NO: 2724 - protein, 135 aa, Betatorquevirus sp.
NTTYIQNRDWGDRNKTYYCQTLGTQRYFLYGTHSTAQNINDIKLQELIPLTNTQDYVQGFDWTEKDKHNITTYKEFLTKGAGNPFHAEWITAQNPVIHTANSPTQIEQIYTASTTTFQNKKLTDLPTPGYIFITP

SEQ ID NO: 2725 - protein, 143 aa, Betatorquevirus sp.
TVSLRYNPYKDLAERNKCYFVRSKINAHGWDPEQHQELINSDLPQWLLLFGYPDYIKRTQNFALVDTNYILVDHCPYTNPEKTPFIPLSTSFIEGRSPYSPSDTHEPDEEDQNRWYPCYQYQQESINSICLSGPGTPKIPKGI

SEQ ID NO: 2726 - protein, 15 aa, Betatorquevirus sp.
TAEAKVKYSFNFKWG

SEQ ID NO: 2727 - protein, 67 aa, Alphatorquevirus sp.
MAWGFWGRRRRWRRWRPRRRRWRPRRRRRRRPARRFRARRRVRRRGGRWRRRYRKWRRGRRRRTHRK

SEQ ID NO: 2728 - protein, 181 aa, Alphatorquevirus sp.
KIVIKQWQPNFIRRCYIIGYLPLIFCGENTTAQNYATHSDDMISKGPYGGGMTTTKFTLRILYDEFTRFMNFWTVSNEDLDLCRYVGCKLIFFKHPTVDFIVQINTQPPFLDTHLTAASIHPGIMMLSKRRILIPSLKTRPSRKHRVVVRVGAPRLFQDKWYPQSDLCDTVLLSIFATACD

SEQ ID NO: 2729 - protein, 31 aa, Alphatorquevirus sp.
LQYPFGSPLTDNPCVNFQILGPQYKKHLSIS

SEQ ID NO: 2730 - protein, 122 aa, Alphatorquevirus sp.
STMDTTNKQHYDSNLFNQTQLYNTFQTIAQLKETGQTANISPSWSAVQNNMALSNTGENATQSKDTWYKGNTYNNHITTLAQKTRERFKGATKAALQNYPTIMSTDLYEYHSGIYSSIFLSA

SEQ ID NO: 2731 - protein, 154 aa, Alphatorquevirus sp.
GRSYFETTGAYSDIIYNPFTDKGTGNIIWIDYLTKEDTIFVKNKSKCEIMDMPLWAACTGYTEFCAKYTGDSAIIYNARVLIRCPYTEPMLIDHSDPNKGFVPYSFNFGNGKMPGGSSNVPIRMRAKWYVNIFHQKEVLETIVQSGPFGYKGDI

SEQ ID NO: 2732 - protein, 19 aa, Alphatorquevirus sp.
KSAVLAMKYRFHWKWGGNP

SEQ ID NO: 2733 - protein, 162 aa, Alphatorquevirus sp.
ISKQVVRNPCSNSSSSAAHRGPRSVQAVDPKYNTPEVTWHSWDIRRGLFGKAGIKRMQQESDALYIPPGPFKRPRRDTNAQDPEEQNESSGFRVQQRLPWVHSSQETQSSQEETEAQGSVQDQLLLQLREQRVLRLQLQQLATQVLKVQAGHGIHPLLSSQA

SEQ ID NO: 2734 - protein, 41 aa, unidentified
MPWYPRRRYPRRRYRWLRRWRARRPFRPRYRRRYWVRNYSR

SEQ ID NO: 2735 - protein, 187 aa, unidentified
KRKLFKITTKEWQPKVIRKTHVKGTYPLFLCTKHRINNNMIQYLDSIAPEHYYGGGGFSIMQFSLQALYEEFIKAKNWWTNTNCFLPLVRYMGCSFKFYKTEFYDYIVLIERCYPLACTDEMYLSTQPSIMMLTRKCIFVPCKQNSKGKKPYKKVRVRPPSQMTTGWHFSQDLANMPLVVLKTSVCS

SEQ ID NO: 2736 - protein, 144 aa, unidentified
FDRYYTDSTAKSTTIGFKTLNTQTFRYHDWQEPPTTGYKPQNLLWFYGAENGSPVDPNNTIVSNLIYLGGTGPYEKGTPIKTNISNYFSEPKLWGNIFHDDYTSGTSPVFVTNKSPSEIKTAWNTIKDLTVKASGVFTLRTIPL

SEQ ID NO: 2737 - protein, 156 aa, unidentified
WLPCRYNPFADKATNNKIWLVSIHSDHTEWKPIDNPLLQRTDLPLWLLVWGWQDWQKKNQQTSQPDINYLTVISSPYISCYPKLDYYVLLDEGFWEGHSTYIESITDSDKKHWYPKNRFQIETLNLIANTGPGTVKLRENQAAEGHMVYRFNFKLG

SEQ ID NO: 2738 - protein, 127 aa, unidentified
GCPAPMEKICDPSKQSKYPIPNNQQQTTSLQSPENPIQTYLYDFDERRGLLTERATKRIKQDHTSEKTVLPFTGAATDLPILQTTSQEESSSEEEEEQQAEKKLLQLRRKQHRLRERILQLLDIQNT

SEQ ID NO: 2739 - protein, 19 aa, unidentified
FDRYYTDSTAKSTTIGFKT

SEQ ID NO: 2740 - protein, 125 aa, unidentified
LNTQTFRYHDWQEPPTTGYKPQNLLWFYGAENGSPVDPNNTIVSNLIYLGGTGPYEKGTPIKTNISNYFSEPKLWGNIFHDDYTSGTSPVFVTNKSPSEIKTAWNTIKDLTVKASGVFTLRTIPL

SEQ ID NO: 2741 - protein, 142 aa, unidentified
WLPCRYNPFADKATNNKIWLVSIHSDHTEWKPIDNPLLQRTDLPLWLLVWGWQDWQKKNQQTSQPDINYLTVISSPYISCYPKLDYYVLLDEGFWEGHSTYIESITDSDKKHWYPKNRFQIETLNLIANTGPGTVKLRENQA

SEQ ID NO: 2742 - protein, 14 aa, unidentified
AEGHMVYRFNFKLG

SEQ ID NO: 2743 - protein, 6 aa, synthetic construct
HHHHHH

SEQ ID NO: 2744 - protein, 5 aa, synthetic construct
GGGGS

SEQ ID NO: 2745 - protein, 6 aa, synthetic construct
TYTTIP

SEQ ID NO: 2746 - protein, 664 aa, unidentified
MPPFRRNWWSNYYKPKWRRRRFPARRRRFTTTFRKRRRRTKKVKRHFYSKKYKRKLKKIILRQWQPSTIKRCKIEGYLCLFQAGKGRFSFNYASYKESFCPEHEPGGGGWGLQQLSLSNLYSQNCDLMNWWTKSNNHLNLCRYMGCEITLFRQDTVDYVFTYFDEQPKNVSKYYYATFHPTKLMLYNRKIVVPSFASQPHKRKPYKRKFIRAPKLMKNQWYFQQQLAPYPLLQFAATAVSLNKMFGSSKALNNNCTVYCLNTDFFRHPHFQYSAQPFTPDGGNQPTYIYTIQRGEPPITAYKYFNLTFLGQTMTNDPGIPLSNNNNYTKNEWGNVFFYKYLNNDELTYVSKETIDQVKQKKNQQITSGFTLKDQPYYYTLKYNPYKDKGKGNQAYWVSNIEATKQNWEPPNDPDLIISDFPFWIMLWGWEDMTKRIGKCRNLDNDWILVLRTQYFSDKMTAYVPLSEAFIHGQGPYFVDRSEIKGQDYAHWYPRYRYQREAIENILMTGPMVCRADNINNIQSLIKYKFFFKWGGTPATMENVYDPMSQPITPSPNNLISTNEIINPETSIDNYIYKWDTRRDILTQKATDRITKSSTYDSNVFTDGRETSTDIPLFQTTQKAPQEETPETQAETLLLQLHQLQQFNLQLQQRFNNLKQLMQNI

SEQ ID NO: 2747 - protein, 656 aa, unidentified
MPWYNYWPRRRRLRRYWRRPRKTLRRRYWRRPRWVRRPYKRKLRKIVLTQFQPKTIRKSKIKGPICLFQTTNKRLVNNFDMYETSEVPEHQPGGGGWGIKVFTLEGLYSEHIYGRNIWTVTNQDLPLVRYLGCSIRFYQSEYTDYVATYSNQLPLQSSLGMYNAMQPNIHLLLKNKITMPGLKTYKRRVPYKKVFVPPPTQLENKWYFQQNIAKTPLLMTRVTACSLNKFYIDPDHINTNLTITSLNVSLFSNRQFQDATDYHPKTVGTINYYLYSTTQNPPYNGPLKLKMLIPLTDTMIYKPGINYEEYKRNNTTKGWNDWKTEYTIYSGNPFHANYLSVGEPVFLIGKKPSDLFSSEEGETSDYTTAELTKTIRYNPYNDQGQTNICYFKANFKSETTWQPPDNPDLTNENLPFWLLLWGFSDWHKKIKKHLHIDSSYILVMRHIPLALNTEYIVPLSDSFLQGKSPFSPEEQPIGADRTTWHPQFQHQAEAINTICSSGPGTTKIPDNYSVQGLMKYSFYFKWGGSPPPMSTIEDPIQQPTYPVPHNFNLTTSLQNPETDPASILWSFDQRRHTLTKKAIERLQKDTGIKTITVTGGSHFDPTPTISQEETSEESSEEEKETSLLEKLQQQQRQQRRLKLRIMKTLLKIQQLE

SEQ ID NO: 2748 - protein, 672 aa, unidentified
MPWRRRRYFRRYRYRPRRWRPRKTFRTRYYRRRHWVRKKRLRKKLKKLHITEYQPSSIRKCKVKGILCLFQTSIERICYNFDMYEESIVPDRLPGGGGFSIKNLSLQSLYLEHTHGHNIFTSTNEPYPLMRYTGCTIRLYRSADVDYIVSYDNQWPLKSTMKMYNSMQPQIHYLLRHRIIVTSKKTNPNKRKLYKKVFIPPPTQMKNQWYFQSTLANIPLFMLRTSATSLDHWFIGTRDKSTNITILTLNTSVIFHRNWDKGTQPYYANVVGTQKVWLYATDQSASPIFNEIKLKNLIFLGNTQHNTQGYSYAEYLTHYHKTHSSTTVEEWQKSANWGNPFYKDYLTNPSNDHQVFASYTDILQFANKLKTSQDTTIKESTFSFTPIEMTKRLRYNPYKDNGVNNLCYFLNCKEVNGLSWDQPHNPDLTNENLPLWILLFGFSDFQKKLAKLKRIDTDYTFVIKSTYTEPTHLYIVPINISMSEGHSPYEDQANFVDDDKWFPSFQFQQEAYTDICLSGPGTARIPKGDTAEAKMHYTFHFKWGGELPDMEQIADPSEKPTYPIPNNFLSTTSLQNPTQAPETYLYKFDQRGDYITKTAAKRIRKDWSTKTDSLSITAPRFAEAAQTQDTSTETTSEEEEEEDLFQQLNQQRLKQQRLKQRIKLILQKLQTT

SEQ ID NO: 2749 - protein, 756 aa, unidentified
MPWWRWRRGWRWPRRRWRTYRRRRRLPRRRPRRAVRRPRRRRVRRRRGRGWYRGRRYSRRLYRRRYVRRKRKTLIWRQWQPQNIRKCRIRGIIPMIICGHLRSNRNYALHSDDIVEQNTPFGGALSTTSWSLKVLYDQHQRGLNRWSSSNEMLDLARYNGCRFTFYRDKVTDFIVTYDISAPYKLDKYSSPSYHPGMMMLKTKNKILIPSFNTKPKGRSTVSVKIKPPKLFLDKWYTQEDLCTVNLVTFAVSAASFTHPFCPPQTDNPCCTFQVLKDFYYPIIGYSAAETKVSSVFSNILYKHCTYYQSFLTQQFIGKIVKLPDGTLVSSLASGPSSYPEGSNINKNSIEQYNTWLSQFNTGANQHYNFCNYKPDYSKLEWLRKYYFEWETYKKASIPPDHLTPSVNWYEYHIGLFSPIFLSPFRSSSLEFPRAYQDVTYNPLVDKGVGNVIWFQYNTKADTQLTLPSCKCVIEDIPLWAAFYGYSDFVQQEIGPYTDAESVGLVCVICPYTKPPMKNPDNPMMGYVFYDSNFGAGKWIDGSGFVPLYWQTRWRPETLFQESTMRDITMTGPFSYKDELKNTVLTAKYKFNFRWGGNLLHEQTIRNPCPTNAHPSTGRQPRDVQVVDPITVGPRFVFHSWDWRRGFLSEAAIKRIRDQPLDYEAYSFMPKRPRFFPPTTGGEQLPGEQEESSSSAEENNLISFEEGQEPKAQAVHKQLLKHLRKQRVLGQRLRALYQNLQKTQAGLHINPLLFSQA

SEQ ID NO: 2750 - protein, 748 aa, unidentified
MAWRWWWRRRRPWPYRRRRWRTIRTRRPRRPVRRRRRRRRVRRRRWGRRRGRRTYYRRRFRKKKRKRKKLVLKQWNPSTIRRCTITGMIPLIVCGHTSAGRNYALRSDDFIPQSQPFGGSFSTTTWNLNVLYDEHLKFHNKWSYPNTQLDLARYLGAYFYFYRDPKTDFIVTYNTVPPFKIDKYSSPMLHPGMLMQRKKRILIPSFETRPKGKRRIRVKIKPPTLFEDKWYTQSDLCSVNLLSLAVSAASFKHPFCPPQTENICITFQVLRDFYYTQMNVTDTKGTDISDKDKAIFDNHLYKFANYYQTVHTLGQLNPTQQPALFSDRQNQGIPEKDSYLSGIGPNKLQTGNNSIYGQPNYNPDIEKLHKIRKWFFKQETTANTIHGQYGHPQNDAVDYHIGKYSPIFLSPYRTNLQFPTAYVDVTYNPLVDKGLGNKMWIQSVTKSDTQFNELNCKCVLQDIPIWAMATGYAEFIESELGLQEEVYSVYIICVICPYTQPKMYSDTNVNTGYVFYDSLFGDGKMPSGTGLVPFYYQSRWYPRLRFQLQVLHDMYICGPFSYKDDLKSTVLTAEYKFRFLWGGNMIPEQVIRNPCKAEGAGSGYTYPDRLPRDLQIADPQTMGPEWAFHTWDWRHGLFGKGALKRVSEKPDYDADYYVLPKKPRFFPPTDGSQGQEKDSDLQEISLPFPFEETLSKSQEEVQTQQQQRDLHLRLAQQQRLGQQLKHLYTQILKTQAGLHINPLLYNHV

SEQ ID NO: 2751 - protein, 735 aa, unidentified
MAYWWWRRRRRRPWRRRRRWRLRRPRRRRATYRRRRGRRRVRKRRGRWRRTYRRWRRRKGRRRHKKKIIMKQWQPNFIRHCFIVGFMPLIFCGENTTSQNFATHSDDLVAKGPYGGGMTTTKFTLRILYDEHLRFMNFWTVSNEDLDLCRYLGVKLTFYRHPTVDFMVQIHTQPPFLDTELTGPSIHPGMMILNKKKIFVPSLKTRPNRKHKVRVKIGPPRLYEDKWYPQSELCDTTLLTVYATACDLQFPFGSPLTDNPCVNFQVLGSAYKKHLSILSTNDSKNLTHYETALFSKTAYYNTFETIAQLKPTGQTTGVTPTWQDVQNTTNLDSSGTNQATSNDTWYYGNTYKDNIKDLTKKARDRYLAATQKAFPAYATLQSPLYEYHGGCYSSIFLSAGRAYFETLGAYSDIIYNPFVDKGIGNMVWIDYLSKEDAVYTPRTSKCLIRDQPLWASFNGYSEFCSKSTGDGAVNINTRVVIKCPYTTPMLADNSNENQGFVPYSLNFGKGKMKGGSSQVPLSWRCKWYVMMYHQQEFMEAIVQSGPWAYKGDEKSAVLAMKYVFNWKWGGNPISGQVVRNPCKTSSSSREPRSIQAVDPKRVAPPLVFHSWDYRRGLFGHASIKRMSEESATPTLFTGPAGKRPRRDTSVQQAEEDQQKESSSFRVQRQLQPWIHSSQETQSSQEEMQAQGTVQEQLIQQLGEQRALRKQLEFLASQVLKVQAGQHIHPLLSSQA

SEQ ID NO: 2752 - protein, 742 aa, unidentified
MAWRWWWNRRPRRRWTRRRWRRLRTRRPRRPVRRRRRRRRVRRRRWGRRRGRRTFYRRRFKKRRRRRRKLTLKQWNPSTIRKCSIRGTVALVMCGHTKAGRNYALHSEDYVPSLISMGGSFSTTTWSLKALYDEFQKFHNRWSYPNTQLDLARFKGSKWTFYRDPKVDYIVTYYTVPPFKLNKLSSPFLHPGMMMQYKKKILVPSYQTKPKGKGKVSIWIKPPVLFEDKWYTQQDLCPVNLLSLAVSAASFLHPFCPPESDNMCITFQVLQDFYYTQMGVTQMTGTTLTEADNNIFKNHLYKQASYYQSLHTTGQLNATQKPANYSTNDKIPQETWLSTTGPAGFKTGNNSIYGVPNYKPDYTKLEEIRKWFFKQETTDNAIHGSYGKPVYNAVDYHIGKYSPIFLSPYRTNTQFSTAYRDITYNPNTDKGKGNHIWIQSVTKTNTTLNSQCRCHIQDIPIWAAVTGYAEFCESELNSEVHNLYICCIICPYTKPKLYNNTDPTQGYVFYDTLFGDGKMPTGTGLVPVWLQSRWYPRLIFQAQVLHDLYLTGPFSYKDDLKSFTISAKYNFKFLWGGTIIPEQVIKNPCKEQDSPFTFTGRQPRDLQVTDPQTMGPEWVFHTWDWRRGLFGENAIKRVSEQPSHDADYYAPPKKPRLFPPTDLQEQESAFDFTPQELKILSEAPQQSEEEENQEEEQQLQQRELQLRLQEQFRIRHQLQHLFVQVLKTQAGLHINPLFLNPV

SEQ ID NO: 2753 - protein, 662 aa, unidentified
MPFWWRRRRKFWTNNRFNYTKRRRYRKRWPRRRRRRRPYRRPIRRRRRKLRKVKRKKKSLIVRQWQPDSIRTCKIIGQSAIVVGAEGKQMYCYTVNKLINVPPKTPYGGGFGVDQYTLKYLYEEYRFAQNIWTQSNVLKDLCRYINVKLIFYRDNKTDFVLSYDRNPPFQLTKFTYPGAHPQQIMLQKHHKFILSQMTKPNGRLTKKLKIKPPKQMLSKWFFSKQFCKYPLLSLKASALDLRHSYLGCCNENPQVFFYYLNHGYYIQTNWGAQSTTAYRPNSSVTETTYYKYKNEKKNIHIKSSEYSESISYDKGYFQSSFLQTQCIYTSAAGDTCAAEKPLGIAIYNPVKDNGDGNMIYLVSTLANTWDQPPKDSAILIQGVPIWLGLFGYLDYCRQIKADKTWLDSHILVMQSPAIFTYPNPGAGKWYCPLSQSFINGNGPFNQPPTLLQKAKWFPQIQYQQEIINSFVESGPFVPKYANQTESNWELKYKYIFTFKWGGPQFHEPEIADPSKQEQYDVPDTFYQTIQIEDPEGQDPRSLIHDWDYRRGFVKERSLKRMSTYFSTHTDQQATSEEDIPKKKKRIGPQLTVPQQKEEETLSCLLSLCKKDTFQETETQEDLQQLIKQQQEQQLLLKRNILQLIHKLKENQQMLQLHTGMLP

SEQ ID NO: 2754 - protein, 662 aa, unidentified
MPFWWPRRRRWWATTRFKRRKPRYPKRRRRRRYKRKYRRAPRRRRRRRRKVRRKKPNLIVRQWQPDSIVLCKIKLFGSLVLGAEGTQYLCYTNEKGAWTPPQQPGGGGFGIETYSLSYLYDQYLLRRCIWTKSNDYKDLCRYLRCKITFFRHPKIDFVVNYARQPPFLLEKPTYMNCHPIALLLSQHKRVILSKRSDPKAKNRVTLIIKPPKQMITKWFFTKQFALFDLLQIQAAACTLNYPKLGCCNENLIISIFYLNPQFFQDSQWAQYTTSPYKPYQTIDTQLTYHYKIGNQTGQYKPEFLNKTGQQAYYESISLDKGWFSPKIMNTQYITQSGSETHLAAIPVGAARYNPEIDDGKGNEIYLVSVTTGHYTKPSEDNLVFRGLPLWLMFFGLYSFIKKIKTASFLPLHMFVVKSEYILPKPKDPQKQYFPFVDLNFINGKNPYNSYISSTQRQTWYPTCEHQVETINAFVKCGPFVPKLDNDRDSTWELPFKSTFYFKWGGPQMPNQNVSDPKDKTSYIVPDTVQEGLQITNPLKQKAESLLHEWDYRRGLIKTKAFKRMLENLSIESDVYPSAETPRKRQRVENSLHYQEEENQEIKTCLLSLCESSSSEKEEEEKNLLHLIQQQQQQQKQLKLQLLTLIKDLKEKQNALQLQTGVI

SEQ ID NO: 2755 - protein, 663 aa, unidentified
MPFWWRRRRKPWYGKWRFRRRRRYNAPRRKRKFYQRRRYRRTNRRRRKYKVRRKKRKTIAIRQWQPESITKCKIIGFSNLVLGAEGTQYLCWTSQQEDYTQPKAPGGGGFGCELINLDWLYSEWVKHNNIWTKTNTNKDLVRYTGAYIYFLRHPTIDFVIAYSLQPPFELTKFTYPDIQPQNLLLRKRKRIILSLASKPHGKRFVKVKIRPPKQMITKWFFQHQFSGYGLVQLSAAAATFRHPNIGPKSQNQMVTIYFLDTTIFNRPNWAQAQEDAWTPAGTHRTWTFEYQVKGQTQPKTVQMPPSTPQDPYKTKYATSISRDYGWWQKAILNSTKVTIDGTMYSNRTVYSARYNPNEDTGQGNAVYLVSLLQSKWTAPSDDRLVIVGQPLWMCMYGLYSYYQDLLKDKNFNTHYMFVVRSPAIKPITVSRQDFYPFIDWDFINGVLPWEEYLSEKIKATWYPQATFQTTTINALVESGPFVPRLTNIPDSTWELVYKYKFFFKWGGPQTHDDHVQDPKHQPDYDTPDTLHQTIQIGDPKKQTPESIIHEWDYRRGFITQTALKRMSENIQTDTDFQSDDSASPRKKRKVTKKMPITSQKEENIKKCLLSLCQEETQETPENLQDLIQQQQQQQHLLKRNLLQLLTHLKQQQRYLSLQTGILD

SEQ ID NO: 2756 - protein, 672 aa, unidentified
MPFWWRRRRKFWRGRRRPFYKRTTKRRRRRVRYRQRFRRPYRRRRRRRKHKVRRKRQKLPIYQWQPDSIRKCKIKGVGTLILGAHGKQFVCYTDVQKKAPPPKAPGGGGFACEQFSLGGLYEQYKFRNNIWTASNINMDLCRYLGVRMIFYRHPDIDFILNYDRQPPFVLDQLTYPLCHPQNLLLGKHKILLLSKATKPNGKLRKKVFIKPPKQMLNKWFFQEQFQSAPLLSIRASICSLQYPHIGCCMPNRTVTFFALNPGFYQQGNWAYDGGETNPYKPWPHIPKKLYFWDVATIPASWMEQEKAKHRVEIDLSTYSQSIDYQKGYFTSKVLQAKLVTQDSTGTSTIANTPLNIARYNPAIDTGKGNTIWLHSNLTTAYTKPAVDKTVILEGLPLWMMLFGWLSWVQHVKGAPDFYLSYTLCVESPAIEIATKGETINPVIPLDASFINGNAPYNQTISQKDLTHWYPDIYNQTEIINSIVTSGPYIPKLDNIKNSTWELHYYYQFFFKWGGPEITDQPVADPSKQPVYDALDKQQQGIQVRNPAKQKYATLMHPWDIRRGIITNKALKRMQQNLSIDSTFEAGSTPAKKPRITGPCFTALQEIHQEERSCLQTLCKESTSQEAQEETDIQLLIAQQQQKQRELKYNLLKLISYMKEQQNMLKLHTGMLN

SEQ ID NO: 2757 - protein, 660 aa, unidentified
MPFWWGRRNRFWYKNNYRRRAYRRKRKRWPKRRRRNFRRPTRRRRRRRRKQKVRKKKQTLTLKVWQPDTIRKCKIKGTGIHIVGGNGTQYRCFTANRFDWTPPLMPGGGGFGVEKFTLQHLYNEHLLSNNIWTQSNKMLDLVRYTGCRIKFYRHETIDFIASYNRNLPFNLEKYTYADSHPNSLLHSRHKKLIPSLKTRRSGKRYITMKIKPPKPVSNKWFFQETFSSTPLFKLTTSIIDLRYPHISQIGSNELVSLFCLNTDFYANAGWGNVHPPGTHSKWYVPYHNIAAITTVVIKGRDTQITVDGSDYKKSVSYETGYFQPKLLQAEKIKNTAMENIPIQASRYNPTKDDGVGNKLWLVNVLNYSFAPPKTDADLYIENLPLWQLVWGFTDFVKQTKKDSTFLNTYYAAFESKYLEPAVSTSKIYIPIDMSFIQGKGPYDSYVSNYRKQNWYPTLNAQLKTLNAIAQAGPFVPKLDNIFLSSWELYSNYTFYFKFGGSELPEPDTVNPQDQGTYVIPTNIQKAIQVSNPQKQSPYTTLHSWDYRRGLITSSAFKRMCENQTTDTEFEPDTETIPKKKKKIQHGNQLQRAEEETQEIQNCLLSLCEENTFQETPQTSLLELIQQQQQQQQQLKHNLLKLLSDLKLKQRSLQLQTGLIH

SEQ ID NO: 2758 - protein, 672 aa, unidentified; identical to SEQ ID NO: 1012

SEQ ID NO: 2759 - protein, 370 aa, unidentified
MPWWYRRRSYNPWRRRNWFRRPRKTIYRRYRRRRRWVRRKPFYKRKIKRLNIVEWQPKSIRKCRIKGMLCLFQTTEDRLSYNFDMYEESIIPEKLPGGGGFSIKNISLYALYQEHIHAHNIFTHTNTDRPLARYTGCSLKFYQSKDIDYVVTYSTSLPLRSSMGMYNSMQPSIHLMQQNKLIVPSKQTQKRRKPYIKKHISPPTQMKSQWYFQHNIANIPLLMIRTTAEAKVKYSFNFKWGGDLPPMSTITNPTDQPTYVVPNNFNETTSLQNPTTRPEHFLYSFDERRGQLTEKATKRLLKDWETKETSLLSTEYRFAEPTQTQAPQEDPSSEEEEESNLFERLLRQRTKQLQLKRRIIQTLKDLQKLE

SEQ ID NO: 2760 - protein, 362 aa, unidentified
MPYYYRRRRYNYRRPRWYGRGWIRRPFRRRERRKRRVRPTYTTIPLKQWQPPYKRTCYIKGQDCLIYYSNLRLGMNSTMYEKSIVPVHWPGGGSFSVSMLTLDALYDIHKLCRNWWTSTNQDLPLVRYKGCKITFYQSTFTDYIVRIHTELPANSNKLTYPNTHPLMMMMSKYKHIIPSRQTRRKKKPYTKIFVKPPPQFENKWYFATDLYKIPLLQIHCTANISMFYKFYFKWGGSPPKAINVENPAHQIQYPIPRNEHETTSLQSPGEAPESILYSFDYRHGNYTTTALSRISQDWALKDTVSKITEPDRQQLLKQALECLQISEETQEKKEKEVQQLISNLRQQQQLYRERIISLLKDQ

SEQ ID NO: 2761 - protein, 414 aa, unidentified
MPFWWRRRRKFWTNNRFNYTKRRRYRKRWPRRRRRRRPYRRPIRRRRRKLRKVKRKKKSLIVRQWQPDSIRTCKIIGQSAIVVGAEGKQMYCYTVNKLINVPPKTPYGGGFGVDQYTLKYLYEEYRFAQNIWTQSNVLKDLCRYINVKLIFYRDNKTDFVLSYDRNPPFQLTKFTYPGAHPQQIMLQKHHKFILSQMTKPNGRLTKKLKIKPPKQMLSKWFFSKQFCKYPLLSLKASANWELKYKYIFTFKWGGPQFHEPEIADPSKQEQYDVPDTFYQTIQIEDPEGQDPRSLIHDWDYRRGFVKERSLKRMSTYFSTHTDQQATSEEDIPKKKKRIGPQLTVPQQKEEETLSCLLSLCKKDTFQETETQEDLQQLIKQQQEQQLLLKRNILQLIHKLKENQQMLQLHTGMLP

SEQ ID NO: 2762 - protein, 441 aa, unidentified
MAYGWWRRRRRRWRRWRRRPWRRRWRTRRRRPARRRGRRRNVRRRRRGRWRRRYRRWKRKGRRRRKAKIIIRQWQPNYRRRCNIVGYLPILICGGNTVSRNYATHSDDTNYPGPFGGGMTTDKFSLRILYDEYKREMNYWTASNEDLQLCRYLGCTFYFFRHPEVDFIIKINTMPPFLDTTITAPSIHPGLMALDKRARWIPSLKNRPGKKHYIKIRVGAPKMFTDKWYPQTDLCDMTLLTIYATASLGIKYRFKWIWGGNPVRQQVVRNPCKEPHSSGNRVPRSIQIVDPRYNSPELTIHAWDFRRGFFGPKAIQRMQQQPTATEFFSAGRKRPRRDTEVYQSDQEKEQKESSLFPPVKLLRRVPPWEDSEQEQSGSQSSEEETATLSQQLKQQLQQQRVLGVKLRLLFNQVQKIQQNQDINPTLLPRGGDLVSFFQAVP

SEQ ID NO: 2763 - protein, 301 aa, unidentified
TLDNYYIGSRQLSTNVTIHTLNTTYIQNRDWGDRNKTYYCQTLGTQRYFLYGTHSTAQNINDIKLQELIPLTNTQDYVQGFDWTEKDKHNITTYKEFLTKGAGNPFHAEWITAQNPVIHTANSPTQIEQIYTASTTTFQNKKLTDLPTPGYIFITPTVSLRYNPYKDLAERNKCYFVRSKINAHGWDPEQHQELINSDLPQWLLLFGYPDYIKRTQNFALVDTNYILVDHCPYTNPEKTPFIPLSTSFIEGRSPYSPSDTHEPDEEDQNRWYPCYQYQQESINSICLSGPGTPKIPKGITA

SEQ ID NO: 2764 - protein, 303 aa, unidentified
NLQNPFVKPDKLSNNVTLWSLNTISIQNRNMSVDQGQSWPFKILGTQSFYFYFYTGANLPGDTTQIPVADLLPLTNPRINRPGQSLNEAKITDHITFTEYKNKFTNYWGNPFNKHIQEHLDMILYSLKSPEAIKNEWTTENMKWNQLNNAGTMALTPFNEPIFTQIQYNPDRDTGEDTQLYLLSNATGTGWDPPGIPELILEGFPLWLIYWGFADFQKNLKKVTNIDTNYMLVAKTKFTQKPGTFYLVILNDTFVEGNSPYEKQPLPEDNIKWYPQVQYQLEAQNKLLQTGPFTPNIQGQLSD

SEQ ID NO: 2765 - protein, 247 aa, unidentified
DLRHSYLGCCNENPQVFFYYLNHGYYIQTNWGAQSTTAYRPNSSVTETTYYKYKNEKKNIHIKSSEYSESISYDKGYFQSSFLQTQCIYTSAAGDTCAAEKPLGIAIYNPVKDNGDGNMIYLVSTLANTWDQPPKDSAILIQGVPIWLGLFGYLDYCRQIKADKTWLDSHILVMQSPAIFTYPNPGAGKWYCPLSQSFINGNGPFNQPPTLLQKAKWFPQIQYQQEIINSFVESGPFVPKYANQTES

SEQ ID NO: 2766 - protein, 327 aa, unidentified
DMQYPFGSPLTDTVVVNSQVLQSMYDETISILPDEKTKRNSLLTSIRSYIPFYNTTQTIAQLKPFVDAGGHTTGSTTTTWGQLLNTTKFTTTTTTTYTYPGTTNTAVTFITANDTWYRGTAYKDNIKDVPQKAAQLYFQTTQKLLGNTFHGSDEYLEYHAGLYSSIWLSPGRSYFETPGAYTDIKYNPFTDRGEGNMLWIDWLSKKNMKYDKVQSKCLVADLPLWAAAYGYVEFCSKSTGDTNIHMNARLLIRSPFTDPQLIVHTDPTKGFVPYSLNFGNGKMPGGSSNVPIRMRAKWYPTLSHQQEVLEALAQSGPFAYHSDIKKV

SEQ ID NO: 2767 - protein, 301 aa, unidentified; identical to SEQ ID NO: 2763

SEQ ID NO: 2768 - protein, 303 aa, unidentified; identical to SEQ ID NO: 2764

SEQ ID NO: 2769 - protein, 247 aa, unidentified; identical to SEQ ID NO: 2765

SEQ ID NO: 2770 - protein, 327 aa, unidentified
DMQYPFGSPLTDTVVVNSQVLQSMYDETISILPDEKTKRNSLLTSIRSYIPFYNTTQTIAQLKPFVDAGGHTTGSTTTTWGQLLNTTKFTTTTTTTYTYPFTTNTAVTGITANDTWYRGTAYKDNIKDVPQKAAQLYFQTTQKLLGNTFHGSDETLEYHAGLYSSIWLSPGRSYFETPGAYTDIKYNPFTDRGEGNMLWIDWLSKKNMKYDKVQSKCLVADLPLWAAAYGYVEFCSKSTGDTNIHMNARLLIRSPFTDPQLIVHTDPTKGFVPYSLNFGNGKMPGGSSNVPIRMRAKWYPTLSHQQEVLEALAQSGPFAYHSDIKKV

SEQ ID NO: 2771 - DNA, 2313 bp, Chicken anemia virus
  source 1..2313: mol_type = genomic DNA
cgagtggttactattccatcaccattctagcctgtacacagaaagtcaagatggacgaatcgctcgacttcgctcgcgattcgtcgaaggcggggggccggaggccccccggtggcccccctccaacgagtggagcacgtacaggggggtacgtcatccgtacaggggggtacgtcatccgtacaggggggtacgtcacaaagaggcgttcccgtacaggggggtacgtcacgcgtacaggggggtacgtcacagccaatcaaaagctgccacgttgcgaaagtgacgtttcgaaaatgggcggcgcaagcctctctatatattgagcgcacataccggtcggcagtaggtatacgcaaggcggtccgggtggatgcacgggaacggcggacaaccggccgctgggggcagtgaatcggcgcttagccgagaggggcaacctgggcccagcggagccgcgcaggggcaagtaatttcaaatgaacgctctccaagaagatactccacccggaccatcaacggtgttcaggccaccaacaagttcacggccgttggaaacccctcactgcagagagatccggattggtatcgctggaattacaatcactctatcgctgtgtggctgcgcgaatgctcgcgctcccacgctaagatctgcaactgcggacaattcagaaagcactggtttcaagaatgtgccggacttgaggaccgatcaacccaagcctccctcgaagaagcgatcctgcgacccctccgagtacagggtaagcgagctaaaagaaagcttgattaccactactcccagccgaccccgaaccgcaaaaaggcgtataagactgtaagatggcaagacgagctcgcagaccgagaggccgattttactccttcagaagaggacggtggcaccacctcaagcgacttcgacgaagatataaatttcgacatcggaggagacagcggtatcgtagacgagcttttaggaaggcctttcacaacccccgccccggtacgtatagtgtgaggctgccgaacccccaatctactatgactatccgcttccaaggggtcatctttctcacggaaggactcattctgcctaaaaacagcacagcggggggctatgcagaccacatgtacggggcgagagtcgccaagatctctgtgaacctgaaagagttcctgctagcctcaatgaacctgacatacgtgagcaaaatcggaggccccatcgccggtgagttgattgcggacgggtctaaatcacaagccgcggacaattggcctaattgctggctgccgctagataataacgtgccctccgctacaccatcggcatggtggagatgggccttaatgatgatgcagcccacggactcttgccggttctttaatcacccaaagcagatgaccctgcaagacatgggtcgcatgtttgggggctggcacctgttccgacacattgaaacccgctttcagctccttgccactaagaatgagggatccttcagccccgtggcgagtcttctctcccagggagagtacctcacgcgtcgggacgatgttaagtacagcagcgatcaccagaaccggtggcaaaaaggcggacaaccgatgacggggggcattgcttatgcgaccgggaaaatgagacccgacgagcaacagtaccctgctatgcccccagaccccccgatcatcaccgctactacagcgcaaggcacgcaagtccgctgcatgaatagcacgcaagcttggtggtcatgggacacatatatgagctttgcaacactcacagcactcggtgcacaatggtcttttcctccagggcaacgttcagtttctagacggtccttcaaccaccacaaggcgagaggagccggggaccccaagggccagagatggcacacgctggtgccgctcggcacggagaccatcaccgacagctacatgtcagcacccgcatcagagctggacactaatttctttacgctttacgtagcgcaaggcacaaataagtcgcaacagtacaagttcggcacagctacatacgcgctaaaggagccggtaatgaagagcgatgcatgggcagtggtacgcgtccagtcggtctggcagctgggtaacaggcagaggccatacccatgggacgtcaactgggcgaacagcaccatgtactgggggacgcagccctgaaaaggggggggggctaaagccccccccccttaaacccccccctgggggggattcccccccagaccccccctttatatagcactcaataaacgcagaaaatagatttatcgcactatc

SEQ ID NO: 2772 - protein, 5 aa, unidentified
PFYPW

SEQ ID NO: 2773 - protein, 666 aa, synthetic construct
MPYYYRRRRYNYRRPRWYGRGWIRRPFRRRFRRKRRVRPTYTTIPLKQWQPPYKRTCYIKGQDCLIYYSNLRLGMNSTMYEKSIVPVHWPGGGSFSVSMLTLDALYDIHKLCRNWWTSTNQDLPLVRYKGCKITFYQSTFTDYIVRIHTELPANSNKLTYPNTHPLMMMMSKYKHIIPSRQTRRKKKPYKRVRVKPPPQFENKWYFATDLYKIPLLQIHCTACNLQNPFVKPDKLSNNVTLWSLNTISIQNRNMSVDQGQSWPFKILGTQSFYFYFYTGANLPGDTTQIPVADLLPLTNPRINRPGQSLNEAKITDHITFTEYKNKFTNYWGNPFNKHIQEHLDMILYSLKSPEAIKNEWTTENMKWNQLNNAGTMALTPFNEPIFTQIQYNPDRDTGEDTQLYLLSNATGTGWDPPGIPELILEGFPLWLIYWGFADFQKNLKKVTNIDTNYMLVAKTKFTQKPGTFYLVILNDTFVEGNSPYEKQPLPEDNIKWYPQVQYQLEAQNKLLQTGPFTPNIQGQLSDNISMFYKFYFKWGGSPPKAINVENPAHQIQYPIPRNEHETTSLQSPGEAPESILYSFDYRHGNYTTTALSRISQDWALKDTVSKITEPDRQQLLKQALECLQISEETQEKKEKEVQQLISNLRQQQQLYRERIISLLKDQ

SEQ ID NO: 2774 - DNA, 9274 bp, synthetic construct
  source 1..9274: mol_type = other DNA
aatgagacctaaaatgaatgcaattgttgttgttaacggggatcctcatcgcggccgctacgtaaattccgccccccccccccctctccctcccccccccctaacgttactggccgaagccgcttggaataaggccggtgtgcgtttgtctatatgttattttccaccatattgccgtcttttggcaatgtgagggcccggaaacctggccctgtcttcttgacgagcattcctaggggtctttcccctctcgccaaaggaatgcaaggtctgttgaatgtcgtgaaggaagcagttcctctggaagcttcttgaagacaaacaacgtctgtagcgaccctttgcaggcagcggaaccccccacctggcgacaggtgcctctgcggccaaaagccacgtgtataagatacacctgcaaaggcggcacaaccccagtgccacgttgtgagttggatagttgtggaaagagtcaaatggctctcctcaagcgtattcaacaaggggctgaaggatgcccagaaggtaccccattgtatgggatctgatctggggcctcggtgcacatgctttacatgtgtttagtcgaggttaaaaaaacgtctaggccccccgaaccacggggacgtggttttcctttgaaaaacacgatgataatatggccacaaccatggataaagttttaaacagagaggaatctttgcagctaatggaccttctaggtcttgaaaggagtgcctgggggaatattcctctgatgagaaaggcatatttaaaaaaatgcaaggagtttcatcctgataaaggaggagatgaagaaaaaatgaagaaaatgaatactctgtacaagaaaatggaagatggagtaaaatatgctcatcaacctgactttggaggcttctgggatgcaactgagattccaacctatggaactgatgaatgggagcagtggtggaatgcctttaatgaggaaaacctgttttgctcagaagaaatgccatctagtgatgatgaggctactgctgactctcaacattctactcctccaaaaaagaagagaaaggtagaagaccccaaggactttccttcagaattgctaagttttttgagtcatgctgtgtttagtaatagaactcttgcttgctttgctatttacaccacaaaggaaaaagctgcactgctatacaagaaaattatggaaaaatattctgtaacctttataagtaggcataacagttataatcataacatactgttttttcttactccacacaggcatagagtgtctgctattaataactatgctcaaaaattgtgtacctttagctttttaatttgtaaaggggttaataaggaatatttgatgtatagtgccttgactagagatccattttctgttattgaggaaagtttgccaggtgggttaaaggagcatgattttaatccagaagaagcagaggaaactaaacaagtgtcctggaagcttgtaacagagtatgcaatggaaacaaaatgtgatgatgtgttgttattgcttgggatgtacttggaatttcagtacagttttgaaatgtgtttaaaatgtattaaaaaagaacagcccagccactataagtaccatgaaaagcattatgcaaatgctgctatatttgctgacagcaaaaaccaaaaaaccatatgccaacaggctgttgatactgttttagctaaaaagcgggttgatagcctacaattaactagagaacaaatgttaacaaacagatttaatgatcttttggataggatggatataatgtttggttctacaggctctgctgacatagaagaatggatggctggagttgcttggctacactgtttgttgcccaaaatggattcagtggtgtatgactttttaaaatgcatggtgtacaacattcctaaaaaaagatactggctgtttaaaggaccaattgatagtggtaaaactacattagcagctgctttgcttgaattatgtggggggaaagctttaaatgttaatttgcccttggacaggctgaactttgagctaggagtagctattgaccagtttttagtagtttttgaggatgtaaagggcactggaggggagtccagagatttgccttcaggtcagggaattaataacctggacaatttaagggattatttggatggcagtgttaaggtaaacttagaaaagaaacacctaaataaaagaactcaaatatttccccctggaatagtcaccatgaatgagtacagtgtgcctaaaacactgcaggccagatttgtaaaacaaatagattttaggcccaaagattatttaaagcattgcctggaacgcagtgagtttttgttagaaaagagaataattcaaagtggcattgctttgcttcttatgttaatttggtacagacctgtggctgagtttgctcaaagtattcagagcagaattgtggagtggaaagagagattggacaaagagtttagtttgtcagtgtatcaaaaaatgaagtttaatgtggctatgggaattggagttttagattggctaagaaacagtgatgatgatgatgaagacagccaggaaaatgctgataaaaatgaagatggtggggagaagaacatggaagactcagggcatgaaacaggcattgattcacagtcccaaggctcatttcaggcccctcagtcctcacagtctgttcatgatcataatcagccataccacatttgtagaggttttacttgctttaaaaaacctcccacacctccccctgaacctgaaacataataagcttgcggccgcttcgagcagacatgataagatacattgatgagtttggacaaaccacaactagaatgcagtgaaaaaaatgctttatttgtgaaatttgtgatgctattgctttatttgtaaccattataagctgcaataaacaagtttcatgtctggctctagctatcccgcccctaactccgcccatcccgcccctaactccgcccagttccgcccattctccgccccatggctgactaattttttttatttatgcagaggccgaggccgcctcggcctctgagctattccagaagtagtgaggaggcttttttggaggccatcggatcccgggcccgtcgactgcagaggcctgcatgcaagcttggtgtaatcatggtcatagctgtttcctgtgtgaaattgttatccgctcacaattccacacaacatacgagccggaagcataaagtgtaaagcctggggtgcctaatgagtgagctaactcacattaattgcgttgcgctcactgcccgctttccagtcgggaaacctgtcgtgccagctgcattaatgaatcggccaacgcgcggggagaggcggtttgcgtattgggcgctcttccgcttcctcgctcactgactcgctgcgctcggtcgttcggctgcggcgagcggtatcagctcactcaaaggcggtaatacggttatccacagaatcaggggataacgcaggaaagaacatgtgagcaaaaggccagcaaaaggccaggaaccgtaaaaaggccgcgttgctggcgtttttccataggctccgcccccctgacgagcatcacaaaaatcgacgctcaagtcagaggtggcgaaacccgacaggactataaagataccaggcgtttccccctggaagctccctcgtgcgctctcctgttccgaccctgccgcttaccggatacctgtccgcctttctcccttcgggaagcgtggcgctttctcatagctcacgctgtaggtatctcagttcggtgtaggtcgttcgctccaagctgggctgtgtgcacgaaccccccgttcagcccgaccgctgcgccttatccggtaactatcgtcttgagtccaacccggtaagacacgacttatcgccactggcagcagccactggtaacaggattagcagagcgaggtatgtaggcggtgctacagagttcttgaagtggtggcctaactacggctacactagaagaacagtatttggtatctgcgctctgctgaagccagttaccttcggaaaaagagttggtagctcttgatccggcaaacaaaccaccgctggtagcggtggtttttttgtttgcaagcagcagattacgcgcagaaaaaaaggatctcaagaagatcctttgatcttttctacggggtctgacgctcagtggaacgaaaactcacgttaagggattttggtcatgagattatcaaaaaggatcttcacctagatccttttaaattaaaaatgaagttttaaatcaagcccaatctgaataatgttacaaccaattaaccaattctgattagaaaaactcatcgagcatcaaatgaaactgcaatttattcatatcaggattatcaataccatatttttgaaaaagccgtttctgtaatgaaggagaaaactcaccgaggcagttccataggatggcaagatcctggtatcggtctgcgattccgactcgtccaacatcaatacaacctattaatttcccctcgtcaaaaataaggttatcaagtgagaaatcaccatgagtgacgactgaatccggtgagaatggcaaaagtttatgcatttctttccagacttgttcaacaggccagccattacgctcgtcatcaaaatcactcgcatcaaccaaaccgttattcattcgtgattgcgcctgagcgagacgaaatacgcgatcgctgttaaaaggacaattacaaacaggaatcgaatgcaaccggcgcaggaacactgccagcgcatcaacaatattttcacctgaatcaggatattcttctaatacctggaatgctgtttttccggggatcgcagtggtgagtaaccatgcatcatcaggagtacggataaaatgcttgatggtcggaagaggcataaattccgtcagccagtttagtctgaccatctcatctgtaacatcattggcaacgctacctttgccatgtttcagaaacaactctggcgcatcgggcttcccatacaagcgatagattgtcgcacctgattgcccgacattatcgcgagcccatttatacccatataaatcagcatccatgttggaatttaatcgcggcctcgacgtttcccgttgaatatggctcataacaccccttgtattactgtttatgtaagcagacagttttattgttcatgatgatatatttttatcttgtgcaatgtaacatcagagattttgagacacgggccagagctgcatcgcgcgtttcggtgatgacggtgaaaacctctgacacatgcagctcccggagacggtcacagcttgtctgtaagcggatgccgggagcagacaagcccgtcagggcgcgtcagcgggtgttggcgggtgtcggggctggcttaactatgcggcatcagagcagattgtactgagagtgcaccatatgcggtgtgaaataccgcacagatgcgtaaggagaaaataccgcatcaggcgccattcgccattcaggctgcgcaactgttgggaagggcgatcggtgcgggcctcttcgctattacgccagctggcgaaagggggatgtgctgcaaggcgattaagttgggtaacgccagggttttcccagtcacgacgttgtaaaacgacggccagagaattcgagctcggtacctcgcgaatacatctagatatggggtctcaatggttggctccggtgcccgtcagtgggcagagcgcacatcgcccacagtccccgagaagttgtggggaggggtcggcaattgaaccggtgcctagagaaggtggcgcggggtaaactgggaaagtgatgtcgtgtactggctccgcctttttcccgagggtgggggagaaccgtatataagtgcagtagtcgccgtgaacgttctttttcgcaacgggtttgccgccagaacacaggtaagtgccgtgtgtggttcccgcgggcctggcctctttacgggttatggcccttgcgtgccttgaattacttccacctggctgcagtacgtgattcttgatcccgagcttcgggttggaagtgggtgggagagttcgaggccttgcgcttaaggagccccttcgcctcgtgcttgagttgaggcctggcctgggcgctggggccaccgcgtgcgaatctggtggcaccttcgcgcctgtctcgctgctttcgataagtctctagccatttaaaatttttgatgacctgctgcgacgctttttttctggcaagatagtcttgtaaatgcgggccaagatctgcacactggtatttcggtttttggggccgcgggcggcgacggggcccgtgcgtcccagcgcacatgttcggcgaggcggggcctgcgagcgcggccaccgagaatcggacgggggtagtctcaagctggccggcctgctctggtgcctggcctcgcgccgccgtgtatcgccccgccctgggcggcaaggctggcccggtcggcaccagttgcgtgagcggaaagatggccgcttcccggccctgctgcagggagctcaaaatggaggacgcggcgctcgggagagcgggcgggtgagtcacccacacaaaggaaaagggcctttccgtcctcagccgtcgcttcatgtgactccacggagtaccgggcgccgtccaggcacctcgattagttctcgagcttttggagtacgtcgtctttaggttggggggaggggttttatgcgatggagtttccccacactgagtgggtggagactgaagttaggccagcttggcacttgatgtaattctccttggaatttgccctttttgagtttggatcttggttcattctcaagcctcagacagtggttcaaagtttttttcttccatttcaggtggtggatctacaaaaaagcagatccaccggtcgccacccagacggaggactcatcacttcagtgactgaggactgatcttgggcaggtgccgaagatgacacattacttaaaaacaccacaatacaatggacgcgcaatggaacttcaattaatgaatacaattattggaaaccatgatctctgctgtggatgcatgacaccagttcttcatattaaagaaataatcaacaccttttcatatacaccatgcccccgtactactggagacaaagaagaccaacatggagacaaagaaactaccgacgctttagaaggcctagaagatggagaattagatcgcttgttcgccgccgatggagaagacgacgaagggtaagaaacaaaagactgtttttccgacgaaaaaaactgactcgactgactttaaaagaatggcaacctaaaaaaattaaaaaatgttccataaaaggaatactacctgcattcatatgcggaaaatcaagaatagcaaacaactatatattattttcagaaagcatagtaccggtgggagaacccggaggaggggcctggtcaatactacaaataaacttaagagtattatatgaccaatttataaaatttaaaaactggtggactgctagcaaccaaggcctaccactaacaagatacttaggaatgaaagtgacattctacaaaactcaatttgtagactacatagttataccacaactatgccctccattttctgtaacaagagacaactacctaaacatacatccagttagaatgttaatgaacagacacaaaattataataccacaaagacaaaaaggaaagaaaaactacattaaaaaatggtttagaccacctgacttaatgcaaaacaaatggtatttccaacaagacatagtaaacataccacttatagtactacacatatcagcagcaagccttgaccaatatagtataccagaaaaccaaatatcaacaaacataacactttggtctctaaacacagacttctttagaaacaaccaattcacaggttatgaagactcaggatacataccaaaaacatttggaacacaaaactactatttatacactgaaggtaatggtgtttctcgcccaactaaattcagtcaaatgataccattaaaaaacacaacaacatatacaaacggaaaaaaagcagcaaccatagaaaactggaaagaaaacagttattggggtaatccatttacacaaaaccacgctagtccagatgtaccaatttactacaacaacacaacacccagcgaaaacaactacagcacaccacaaacattcaccccattacatgaactctacttccaatgcagatacaatccagaaaaggacacaggcataggtaacaaagtattttttaaatcaaacaaactaaaacaaggagaaattgacactattccagacaaagacgaaatagttataacagactttccactatggttaatattttactcttggattagctggatacaaaaaagcaaacctatacaacatataatgaatgactactactttattgttataacaccatttatagaaccaaaaagaaaaagctacctatttttagacacttactttgtacagccaataacaaacagattaacagaaacagaaaaacaacactggtatccacaaactggataccaaacagatgtaatttttagctttgcacaaacaggcccagcaacacctaaaatagatagatcacaatcaatacaagcacaatttaaatacaatgtaaaactaaaatggggcggatgtcctgcaccaatggaactaataactgatccatcattacaggacaaatttcccatccccaatacaatcttcaaaacacttgagatccaaaatccagaaacaaacaaaaggactctactgtacgacttcgacgaaagacatgacggacttacggacagagctgcaaaaagaattaaaacagaacaaatatttgaaacatcttttacaggacaactaccaacagatcccaatatcaggatccaaacacaagaaacgacctcatcgtcggaggaagaaagcgaagtatcactcaaggaggagctcaagctcctcaagcgaaaaaacaagcagctcagaaacaagctcctcagactaacatcttactaaaaccaaaaattatatacgctccatacactatgtttggagacaaagccactaaaaaactaacacctattaagggtaaaagttgggaggcagaacttcagttagctaaaatgttcaaaagaccacttagaacttatgaagaggaccccccatattatccctgggttgttcctgaaccagttgtaaactttcacttaaattttaaagaataa

SEQ ID NO: 2775 - DNA, 6951 bp, synthetic construct
  source 1..6951: mol_type = other DNA
tttccataggctccgcccccctgacgagcatcacaaaaatcgacgctcaagtcagaggtggcgaaacccgacaggactataaagataccaggcgtttccccctggaagctccctcgtgcgctctcctgttccgaccctgccgcttaccggatacctgtccgcctttctcccttcgggaagcgtggcgctttctcatagctcacgctgtaggtatctcagttcggtgtaggtcgttcgctccaagctgggctgtgtgcacgaaccccccgttcagcccgaccgctgcgccttatccggtaactatcgtcttgagtccaacccggtaagacacgacttatcgccactggcagcagccactggtaacaggattagcagagcgaggtatgtaggcggtgctacagagttcttgaagtggtggcctaactacggctacactagaaggacagtatttggtatctgcgctctgctgaagccagttaccttcggaaaaagagttggtagctcttgatccggcaaacaaaccaccgctggtagcggtggtttttttgtttgcaagcagcagattacgcgcagaaaaaaaggatctcaagaagatcctttgatcttttctacggggtctgacgctcagtggaacgaaaactcacgttaagggattttggtcatgagcggatacatatttgaatgtatttagaaaaataaacaaaagagtttgtagaaacgcaaaaaaggccatccgtcaggatggccttctgcttaatttgatgcctggcagtttatggcgggcgtcctgcccgccaccctccgggccgttgcttcgcaacgttcaaatccgctcccggcggatttgtcctactcaggagagcgttcaccgacaaacaacagataaaacgaaaggcccagtctttcgactgagcctttcgttttatttgatgcctggcagttccctactctcgcatggggagaccccacactaccatcggcgctacggcgtttcacttctgagttcggcatggggtcaggtgggaccaccgcgctactgccgccaggcaaattctgttttatcagaccgcttctgcgttctgatttaatctgtatcaggctgaaaatcttctctcatccgccaaaacagccaagctggagaccgtttggccccccctcgagcgcgtagaaagccagtccgcagaaacggtgctgaccccggatgaatgtcagctactgggctatctggacaagggaaaacgcaagcgcaaagagaaagcaggtagcttgcagtgggcttacatggcgatagctagactgggcggttttatggacagcaagcgaaccggaattgccagctggggcgccctctggtaaggttgggaagccctgcaaagtaaactggatggctttcttgccgccaaggatctgatggcgcaggggatcaagctctgatcaagagacaggatgaggatcgtttcgcatgattgaacaagatggattgcacgcaggttctccggccgcttgggtggagaggctattcggctatgactgggcacaacagacaatcggctgctctgatgccgccgtgttccggctgtcagcgcaggggcgcccggttctttttgtcaagaccgacctgtccggtgccctgaatgaactgcaagacgaggcagcgcggctatcgtggctggccacgacgggcgttccttgcgcagctgtgctcgacgttgtcactgaagcgggaagggactggctgctattgggcgaagtgccggggcaggatctcctgtcatctcaccttgctcctgccgagaaagtatccatcatggctgatgcaatgcggcggctgcatacgcttgatccggctacctgcccattcgaccaccaagcgaaacatcgcatcgagcgagcacgtactcggatggaagccggtcttgtcgatcaggatgatctggacgaagagcatcaggggctcgcgccagccgaactgttcgccaggctcaaggcgagcatgcccgacggcgaggatctcgtcgtgacccatggcgatgcctgcttgccgaatatcatggtggaaaatggccgcttttctggattcatcgactgtggccggctgggtgtggcggaccgctatcaggacatagcgttggctacccgtgatattgctgaagagcttggcggcgaatgggctgaccgcttcctcgtgctttacggtatcgccgctcccgattcgcagcgcatcgccttctatcgccttcttgacgagttcttctgaattattaactcgagatccactagagtgtggcggccgcattcttataatcagcatcatgatgtggtaccacatcatgatgctgattacccccaactgagagaactcaaaggttaccccagttggggcgggccccacctgcatcgttttcagagctgaggccatagagcccaccgcatccccagcatgcctgctattgtctacccaatcctcccccttgctgtcctgccccaccccaccccccagaatagaatgacacctactcagacaatgcgatgcaatttcctcattttattaggaaaggacagtgggagtggcaccttccagggtcaaggaaggcacgggggaggggcaaacaacagatggctggcaactagaaggcacagtcggctgagggaaccaggcggggaggcggcccaaagggagatccgactcgtctgagggcgaaggcgaagacgcggaagaggccgcagagccggcagcaggccgcgggaaggaaggtccgctggattgagggccgaagggacgtagcagaaggacgtcccgcgcagaatccaggtggcaacacaggcgagcagccatggaaaggacgtcagcttccccgacaacaccacggaattgtcagtgcccaacagccgagcccctgtccagcagcgggcaaggcaggcggcgatgagttccgccgtggcaatagggagggggaaagcgaaagtcccggaaaggagctgacaggtggtggcaatgccccaaccagtgggggttgcgtcagcaaacacagtgcacaccacgccacgttgcctgacaacgggccacaactcctcataaagagacagcaaccaggatttatacaaggaggagaaaatgaaagccatacgggaagcaatagcatgatacaaaggcattaaagcagcgtatccacatagcgtaaaaggagcaacatagttaagaataccagtcaatctttcacaaattttgtaatccagaggttgattgctgaggttattacttgtacagctcgtccatgccgagagtgatcccggcggcggtcacgaactccagcaggaccatgtgatcgcgcttctcgttggggtctttgctcagggcggactgggtgctcaggtagtggttgtcgggcagcagcacggggccgtcgccgatgggggtgttctgctggtagtggtcggcgagctgcacgctgccgtcctcgatgttgtggcggatcttgaagttcaccttgatgccgttcttctgcttgtcggccatgatatagacgttgtggctgttgtagttgtactccagcttgtgccccaggatgttgccgtcctccttgaagtcgatgcccttcagctcgatgcggttcaccagggtgtcgccctcgaacttcacctcggcgcgggtcttgtagttgccgtcgtccttgaagaagatggtgcgctcctggacgtagccttcgggcatggcggacttgaagaagtcgtgctgcttcatgtggtcggggtagcggctgaagcactgcacgccgtaggtcagggtggtcacgagggtgggccagggcacgggcagcttgccggtggtgcagatgaacttcagggtcagcttgccgtaggtggcatcgccctcgccctcgccggacacgctgaacttgtggccgtttacgtcgccgtccagctcgaccaggatgggcaccaccccggtgaacagctcctcgcccttgctcaccatggtggcgaccggtggatctgcttgctgaggttttgtagatccagttagccagagagctctgcttatatagacctcccaccgtacacgcctaccgcccatttgcgtcaatggggcggagttgttacgacattttggaaagtcccgttgattttggtgccaaaacaaactcccattgacgtcaatggggtggagacttggaaatccccgtgagtcaaaccgctatccacgcccattgatgtactgccaaaaccgcatcaccatggtaatagcgatgactaatacgtagatgtactgccaagtaggaaagtcccataaggtcatgtactgggcataatgccaggcgggccatttaccgtcattgacgtcaatagggggcgtacttggcatatgatacacttgatgtactgccaagtgggcagtttaccgtaaatactccacccattgacgtcaatggaaagtccctattggcgttactatgggaacatacgtcattattgacgtcaatgggcgggggtcgttgggcggtcagccaggcgggccatttaccgtaagttatgtaacgcggaactccatatatgggctatgaactaatgaccccgtaattgattactattaataactaggctgaggaccgctgaaaaataaaataattttaagtttcttgcccgttccgctagactgaactagcccgaattgccccttgacttcggtggtttcactcaccttcggcacccgcccaagttcagtccgcagtcagtaactgatgcgttctccgtctagcggcataaactcagccattcggaagtgcacttggtattatagtgtggtagtacctcccaggatgtgactgtgtttaataattaatttgtaggtgtggttttaaaaggggaagttgttttgtggaagttaattagcatatcagtttgtggttagccatgcaaattatgtggttttccggcagttggaaaaaagcagaagttgttgcaaaaaggggaactaagtgacggtttgtggtcggcaatttaaattaggtggttttcctgttgaatatttattagggggtgtaagggggcgtagcccccttgggggtttcagggggcggagccccctgggggttaaagggggcggagccccctttctgcgcctgcgtattagggaggcggtgaccgtttattaaggtttaacttaaataaacagactccttaagtgaattaatgctggcctttttcgatgcaggtgcgcgcccggggagcccaagggcacgccctggcaccgcggccgctgagtctcgaccatcatcatcatcatcattgagtttatctgggataacagggtaatgtcatctagggataacagggtatgtcatctgggataacagggtaatgtatctagggataacagggtaatgtcatctgggataacagggtaatgtcatctagggataacagggtatgtcatctgggataacagggtaatgtatctagggataacagggtaatgtcatctgggataacagggtaatgtcatctagggataacagggtatgtcatctgggataacagggtaatgtatctagggataacagggtaatgtcatctgggataacagggtaatgtcatctagggataacagggtatgtcatctgggataacagggtaatgtatctagggataacagggtaatgtcatctgggataacagggtaatgtcatctagggataacagggtatgtcatctgggataacagggtaatgtatctagggataacagggtaatgtcatctgggataacagggtaatgtcatctagggataacagggtatgtcatctgggataacagggtaatgtatctagggataacagggtaatgtcatctgggataacagggtaatgtcatctagggataacagggtatgtcatctgggataacagggtaatgtatctagggataacagggtaatgtcatctgggataacagggtaatgtcatctagggataacagggtatgtcatctgggataacagggtaatgtatctagggataacagggtaatgtcaaacggtctccagcttggctgttttggcggatgagagaagaatcgccagcgtcgcacagcatgtttgcttgtcgccgtcgcgtctgtcacatcttttccgccagcagttagggattagcgtcttaagctggcgcgaggaccaacgtatcagccaggcgaagctgcttttgagcaccacccggatgcctatcgccaccgtcggtcgcaatgttggttttgacgatcaactctatttctcgcgggtatttaaaaaatgcaccggggccagcccgagcgagttccgtgccggttgtgaagaaaaagtgaatgatgtagccgtcaagttgtcataattggtaacgaatcagacaattgacggcttgacggagtagcatagggtttgcagaatccctgcttcgtccatttgacaggcacattatgcatgccgcttcgccttcgcgcgcgaattgatctgctgcctcgcgcgtttcggtgatgacggtgaaaacctctgacacatgcagctcccggagacggtcacagcttgtctgtaagcggatgccgggagcagacaagcccgtcagggcgcgtcagcgggtgttggcgggtgtcggggcgcagccatgacccagtcacgtagcgatagcggagtgtatactggcttaactatgcggcatcagagcagattgtactgagagtgcaccatatgcggtgtgaaataccgcacagatgcgtaaggagaaaataccgcatcaggcgctcttccgcttcctcgctcactgactcgctgcgctcggtcgttcggctgcggcgagcggtatcagctcactcaaaggcggtaatacggttatccacagaatcaggggataacgcaggaaagaacatgtgagcaaaaggccagcaaaaggccaggaaccgtaaaaaggccgcgttgctggcgtt

SEQ ID NO: 2776 - protein, 45 aa, synthetic construct
MPWYPRRRYPRRRYRWLRRWRARRPFRPRYRRRYWVRNYSRKRKL

SEQ ID NO: 2777 - protein, 52 aa, synthetic construct
MPYYYRRRRYNYRRPRWYGRGWIRRPFRRRFRRKRRVRPTYTTIPLKQWQPP

SEQ ID NO: 2778 - protein, 12 aa, unidentified
SLKSPEAIKNEW

SEQ ID NO: 2779 - protein, 12 aa, unidentified
SLKSPTQIKNEW

SEQ ID NO: 2780 - protein, 12 aa, unidentified
SLKSPTQIENEW

SEQ ID NO: 2781 - protein, 12 aa, unidentified
SLKSPEAIEQIW

SEQ ID NO: 2782 - protein, 12 aa, unidentified
SLKSPEAIKQIY

SEQ ID NO: 2783 - protein, 12 aa, unidentified
SLKSPTQIEQIY

SEQ ID NO: 2784 - DNA, 395 bp, synthetic construct
  source 1..395: mol_type = other DNA
ggaatgaaagaccccacctgtaggtttggcaagctaggatcaaggttaggaacagagagacagcagaatatgggccaaacaggatatctgtggtaagcagttcctgccccggctcagggccaagaacagttggaacagcagaatatgggccaaacaggatatctgtggtaagcagttcctgccccggctcagggccaagaacagatggtccccagatgcggtcccgccctcagcagtttctagagaaccatcagatgtttccagggtgccccaaggacctgaaatgaccctgtgccttatttgaactaaccaatcagttcgcttctcgcttctgttcgcgcgcttctgctccccgagctcaataaaagagcccacaacccctcactcggcgcgat

SEQ ID NO: 2785 - DNA, 517 bp, synthetic construct
  source 1..517: mol_type = other DNA
aatgaaagaccccacctgtaggtttggcaagctagcttaagtaacgccattttgcaaggcatggaaaatacataactgagaatagagaagttcagatcaaggttaggaacagagagacagcagaatatgggccaaacaggatatctgtggtaagcagttcctgccccggctcagggccaagaacagatggtccccagatgcggtcccgccctcagcagtttctagagaaccatcagatgtttccagggtgccccaaggacctgaaatgaccctgtgccttatttgaactaaccaatcagttcgcttctcgcttctgttcgcgcgcttctgctccccgagctcaataaaagagcccacaacccctcactcggcgcgccagtcctccgatagactgcgtcgcccgggtacccgtattcccaataaagcctcttgctgtttgcatccgaatcgtggactcgctgatccttgggagggtctcctcagattgattgactgcccacctcgggggtctttcatt

SEQ ID NO: 2786 - DNA, 408 bp, synthetic construct
  source 1..408: mol_type = other DNA
gtaacgccattttgcaaggcatggaaaaataccaaaccaagaatagagaagttcagatcaagggcgggtacatgaaaatagctaacgttgggccaaacaggatatctgcggtgagcagtttcggccccggcccggggccaagaacagatggtcaccgcagtttcggccccggcccgaggccaagaacagatggtccccagatatggcccaaccctcagcagtttcttaagacccatcagatgtttccaggctcccccaaggacctgaaatgaccctgcgccttatttgaattaaccaatcagcctgcttctcgcttctgttcgcgcgcttctgcttcccgagctctataaaagagctcacaacccctcactcggcgcgccagtcctccgacagactgagtcgcccggg

1. An Anellovector genetic element comprising:
a) a recombinase hybrid site;
b) one or both of an Anellovirus 5′ NCR sequence and Anellovirus 3′ NCR sequence, and
c) a sequence encoding an exogenous effector.

2. (canceled)

3. The Anellovector genetic element of claim 1, which does not comprise a vector backbone.

4. The Anellovector genetic element of claim 1, which is less than 5 kb, 4 kb, or 3 kb in length.

5. The Anellovector genetic element of claim 1, which comprises, from upstream to downstream, the recombinase hybrid site, the Anellovirus 3′ NCR sequence, the Anellovirus 5′ NCR sequence, and the sequence encoding an exogenous effector.

6. (canceled)

7. The Anellovector genetic element of claim 1, which comprises, from upstream to downstream, the Anellovirus 3′ NCR sequence, the recombinase hybrid site, the Anellovirus 5′ NCR sequence, and the sequence encoding an exogenous effector.

8.-10. (canceled)

11. The Anellovector genetic element of claim 1, wherein the recombinase hybrid site is a loxP site, an attL site, or an attR site.

12.-13. (canceled)

14. The Anellovector genetic element of claim 1, wherein the recombinase hybrid site has a nucleotide sequence of a recombinase hybrid site as listed in any of Tables V3-V5, or a sequence having at last 80%, 85%, 90%, or 95% identity thereto.

15. The Anellovector genetic element of claim 1:
(a) circular; and/or
(b) single stranded.

16.-17. (canceled)

18. The Anellovector genetic element of claim 1, which comprises an Anellovirus origin of replication.

19. (canceled)

20. A host cell comprising the Anellovector genetic element of claim 1.

21.-22. (canceled)

23. An Anellovector particle comprising the Anellovector genetic element of claim 1, encapsulated in a proteinaceous exterior.

24. The Anellovector particle of claim 23, wherein the proteinaceous exterior comprises an ORF1 molecule.

25.-28. (canceled)

29. A method of treating a disease or disorder in the subject in need thereof, the method comprising:
Administering the Anellovector particle of claim 23 to the subject,
wherein the exogenous effector is expressed in the subject,
thereby treating the disease or disorder in the subject.

30. A first DNA construct comprising, in order:
a) a first recombinase recognition site;
b) an Anellovector genetic element sequence comprising a sequence encoding an exogenous effector;
c) a second recombinase recognition site in the same orientation as the first recombinase recognition site; and
d) a vector backbone suitable for replication in a host cell;
wherein the first and second recombinase recognition sites are recognized by the same site-specific recombinase, and
wherein the DNA construct is circular and double stranded.

31.-78. (canceled)

79. A DNA construct comprising:
a) one or more of: a sequence encoding an ORF1 molecule, a sequence encoding an ORF2 molecule, and a sequence encoding an ORF3 molecule;
b) optionally a sequence encoding a replication protein; and
c) an exogenous origin.

80.-136. (canceled)

137. A method of making an Anellovector particle, the method comprising:
(i) incubating a host cell comprising the DNA construct of claim 30, under conditions suitable for expressing the ORF1 molecule; and
(ii) incubating the host cell under conditions suitable for encapsulation, within a proteinaceous exterior comprising the ORF1 molecule, of an Anellovector genetic element in the host cell.

138.-221. (canceled)

222. An anellovector comprising:
(i) a proteinaceous exterior comprising an ORF1 molecule, having an ORF1 sequence of a first Anellovirus genomic sequence, or a polypeptide comprising an amino acid sequence having at least about 70%, 75%, 80%, 85%, 90%, 95%, 96%, 97%, 98%, or 99% sequence identity thereto; and
(ii) a genetic element enclosed by the proteinaceous exterior, wherein the genetic element comprises:
a nucleic acid sequence encoding an exogenous effector; and
one or both of:
(a) an Anellovirus GC-rich region, having the sequence of an Anellovirus GC-rich region of a second Anellovirus genomic sequence, or a nucleic acid comprising a nucleotide sequence having at least about 85%, 90%, 95%, 96%, 97%, 98%, or 99% sequence identity thereto,
wherein the Anellovirus GC-rich region has a higher level of sequence similarity to the Anellovirus GC-rich region of the second Anellovirus genomic sequence than to the Anellovirus GC-rich region of the first Anellovirus genomic sequence; and
(b) an Anellovirus 5′ UTR conserved domain, having the sequence of an Anellovirus 5′ UTR conserved domain of the second Anellovirus genomic sequence, or a nucleic acid comprising a nucleotide sequence having at least about 91%, 92%, 93%, 94%, 95%, 96%, 97%, 98%, or 99% sequence identity thereto,
wherein the Anellovirus 5′ UTR conserved domain has a higher level of sequence similarity to the Anellovirus 5′ UTR conserved domain of the second Anellovirus genomic sequence than to the Anellovirus 5′ UTR conserved domain of the first Anellovirus genomic sequence.

223.-267. (canceled)

268. A system comprising a first DNA construct of claim 30 and a second DNA construct comprising:
a) one or more of: a sequence encoding an ORF1 molecule, a sequence encoding an ORF2 molecule, and a sequence encoding an ORF3 molecule;
b) optionally a sequence encoding a replication protein; and
c) an exogenous origin.

269. The system of claim 268, which further comprises a third DNA construct encoding the site-specific recombinase.

270. A composition comprising:
(I) an isolated nucleic acid molecule comprising:
(a) one or both of:
(a1) an Anellovirus GC-rich region, wherein the Anellovirus GC-rich region has a sequence of the reverse complement of the Anellovirus GC-rich region of any of SEQ ID NOs: 210, 207, or 204, or a nucleic acid sequence having at least about 90%, 95%, 96%, 97%, 98%, or 99% sequence identity thereto; and
(a2) an Anellovirus 5′ UTR conserved domain, wherein the Anellovirus 5′ UTR conserved domain has a sequence of the reverse complement of the Anellovirus 5′ UTR conserved domain of any of SEQ ID NOs: 210, 207, or 204, or a nucleic acid sequence having at least about 90%, 95%, 96%, 97%, 98%, or 99% sequence identity thereto; and
(b) a promoter element operably linked to a nucleic acid sequence encoding an exogenous effector; or
(II) an anellovector comprising:
(i) a proteinaceous exterior comprising an ORF1 molecule having an ORF1 sequence of any of SEQ ID NOs: 211, 208, or 205, or a polypeptide comprising an amino acid sequence having at least about 70%, 75%, 80%, 85%, 90%, 95%, 96%, 97%, 98%, or 99% sequence identity thereto, and
(ii) a genetic element enclosed by the proteinaceous exterior, wherein the genetic element comprises a promoter element operably linked to a nucleic acid sequence encoding an exogenous effector.
